(19) United States
(12) Patent Application Publication
(10) Pub. No.: US 2016/0355835 A1
(43) Pub. Date: Dec. 8, 2016

(54) METHODS OF MODULATING PLANT SEED AND NECTARY CONTENT

(71) Applicant: CARNEGIE INSTITUTION OF WASHINGTON, Washington, DC (US)

(72) Inventor: Wolf B. Frommer, Washington, DC (US)

(73) Assignee: CARNEGIE INSTITUTION OF WASHINGTON, Washington, DC (US)

(21) Appl. No.: 14/774,352

(22) PCT Filed: Mar. 13, 2014
(86) PCT No.: PCT/US14/25310

§ 371 Date: Sep. 10, 2015

Related U.S. Application Data
(60) Provisional application No. 61/779,066, filed on Mar. 13, 2013.

(51) Int. Cl. C12N 15/82

(52) U.S. Cl. CPC C12N 15/8245

(57) ABSTRACT

The present invention relates to methods of increasing the levels of at least one sugar in developing seeds in a plant, with the methods comprising inserting an exogenous nucleic acid, which codes for at least one sugar transporter protein (SWEET protein), into a plant cell to create a transgenic plant cell, and subjecting the transgenic plant cell to conditions that promote expression of the at least one SWEET protein during seed development. The methods results in transgenic plant seeds, and transgenic plants that produce seed, where the levels of at least one sugar are increased as compared to seeds from non-transgenic plants of the same species grown under the same conditions.

### STATEMENT REGARDING FEDERALLY SPONSORED RESEARCH OR DEVELOPMENT

[0001] Part of the work performed during development of this invention utilized U.S. Government funds under Department of Energy Grant No. DE-FG02-04ER15542 and National Science Foundation Grant No. 0820730. The U.S. Government has certain rights in this invention.

### SEQUENCE LISTING INFORMATION

[0002] A computer readable text file, entitled “056100-5093-WO-SequenceListing.txt,” created on or about 12 Mar. 2014 with a file size of about 923 kb contains the sequence listing for this application and is hereby incorporated by reference in its entirety.

### BACKGROUND OF THE INVENTION

[0003] Field of the Invention

[0004] The present invention relates to methods of increasing the levels of at least one sugar in developing seeds in a plant, with the methods comprising inserting an exogenous nucleic acid, which codes for at least one sugar transporter protein (SWEET protein), into a plant cell to create a transgenic plant cell, and subjecting the transgenic plant cell to conditions that promote expression of the at least one SWEET protein during seed development. The methods results in transgenic plant seeds, and transgenic plants that produce seed, where the levels of at least one sugar are increased as compared to seeds from non-transgenic plants of the same species grown under the same conditions.

[0005] Background of the Invention

[0006] Yield potential is determined by the efficiency with which plants intercept light, harness it as chemical energy and ultimately make storage products in harvest organs. Sugars are a dominant currency in these transactions, yet the path from the arrival of sucrose at the terminal phloem endings that enter developing seeds and the subsequent transfer and conversion steps that leads to seed filling are among the least understood parts of the energy conversion chain.

[0007] In most plants sucrose is the major form of carbohydrate translocated from source to sink tissues. Sucrose is synthesized predominantly in leaf cells via a pair of enzymes, sucrose phosphate synthase and sucrose phosphate phosphatase, and is then exported into the apoplasm by sucrose transporters of the SWEET family and subsequently imported into the vasculature with the help of sucrose/H⁺ co-transporters of the SUT family. It is assumed that the driving force for sucrose translocation in the phloem is created by active import of sucrose into the veins, thereby creating an osmotic gradient and pressure driven flow and that SWEETs feed the SUTs. One of the least understood areas of carbon allocation is phloem unloading and specifically the transfer of sugars from the maternal phloem to the developing embryo and endosperm. In legumes, post-phloem unloading is assumed to occur symplasmically, via plasmodesmata, followed by efflux of sucrose from the seed coat via an elusive efflux transport mechanism. The developing legume embryo takes up sucrose with the help of sucrose/H⁺ cotransporters of the SUT family. Overexpression of SUT1 in developing embryos of pea led to increased sucrose influx, indicating that there is potential for increasing yield through increasing active influx into the embryo in large seed dicots. Accumulation of carbohydrates in the embryo is further driven by enzymatic conversion of sucrose to hexoses and activated hexoses via invertases and sucrose synthase as well as by consuming these products by synthesis of starch and other storage compounds.

[0008] Sucrose-metabolizing enzymes such as cell wall invertase (Mn1) in the basal endosperm transfer layer (BETL) and sucrose synthase (SuSy) in the endosperm also play crucial roles in carbon transfer. This two-step degradation is indicative of re-synthesis of sucrose in the endosperm before conversion into starch. However to date, and despite its pivotal role in determining yield, the path of sugar transfer and metabolism in maize kernels remains somewhat unclear. Little is known about membrane transporters that drive accumulation of sugars in this important organ.

[0009] Metabolism and transport are closely coupled at the cellular, subcellular, tissue, and whole organism level. While most modeling of metabolic and transport networks in plant systems have been focused on the cellular level, models at the tissue level that integrate transport and metabolic production, consumption and storage are well established for mammalian systems. Brain, heart and liver models have successfully integrated multiple transported metabolites undergoing metabolism through linked metabolic steps of several pathways in several tissue compartments inside and between cells. Established theoretical frameworks, together with modern computing hardware and software tools, allow numerical solution and testing of models that capture key features of tissue level transport and transformation of substrates and products.

[0010] Several published plant studies have integrated transport, metabolism and/or storage to varying degrees. Detailed modeling of spatial and developmental auxin transport and signaling has elegantly illuminated hormonal regulation of meristem growth. Published models of sucrose transport, metabolism and storage in sugarcane led to the identification of control points, and a target for increasing flux to sucrose was identified and experimentally validated by transgenic manipulation.

### SUMMARY OF THE INVENTION

[0011] The present invention relates to methods of increasing the levels of at least one sugar in developing seeds in a plant, with the methods comprising inserting an exogenous nucleic acid, which codes for at least one sugar transporter protein (SWEET protein), into a plant cell to create a transgenic plant cell, and subjecting the transgenic plant cell to conditions that promote expression of the at least one SWEET protein during seed development. The methods results in transgenic plant seeds, and transgenic plants that produce seed, where the levels of at least one sugar are increased as compared to seeds from non-transgenic plants of the same species grown under the same conditions.

### BRIEF DESCRIPTION OF THE DRAWINGS

[0012] FIG. 1 depicts SWEET9, a sucrose transporter, being necessary for nectar secretion. a-b, Sucrose uptake (a) and efflux (b) activity of AtSWEET9, and BrSWEET9 were performed in Xenopus oocytes. Truncated AtSWEET9_F201* (AtSWEET9m) and BrSWEET9_L201* (BrSWEET9m) served as negative controls. a, Oocyte uptake assay: SWEET9 and SWEET9 mediate ¹⁴C-sucrose uptake (±SEM, n≧14), *t significant at P<0.05., **t significant at P<0.01. b, Oocyte efflux assay: ¹⁴C-sucrose efflux by SWEET9 and SWEET9 in Xenopus oocytes injected with ¹⁴C-sucrose (±SEM, n≧8). c, Nectar droplet clinging to inside of sepal (wild-type). d-e, Lack of nectar in nectaries of sweet9-1 and sweet9-2 mutants. f, Increased nectar secreted from nectaries of flowers containing extra copies of SWEET9-eGFP. g-h, Nectar secreted from nectaries of complemented atsweet9 mutants under its native promoter: SWEET9 (g) or SWEET9-eGFP (h).

[0013] FIG. 2 depicts the cellular and subcellular localization of SWEET9 and starch accumulation in sweet9 mutants. a-d, Histochemical GUS analysis in Arabidopsis flowers expressing translational GUS fusion of SWEET9 (native promoter). GUS staining in lateral (a) and median nectaries (b), c-d, Transverse (c) and vertical (d) section of Arabidopsis flowers showing tissue specific localization of SWEET9. Cell walls stained with safranin-O (orange). e, Confocal images of eGFP fluorescence of proSWEET9:SWEET9-eGFP fusion showing subcellular localization at plasma membrane and Golgi. f-g, Flowers of wild-type (f) and sweet9-1 mutant (g) stained with Lugol's iodine solution 4 hours after dawn: starch in the floral stalk of sweet9-1. h-i, Close-up of nectaries for wild-type and sweet9-1. Starch accumulated only in guard cells of wild-type nectaries and in nectary parenchyma in sweet9-1 (sampled at the end of dark). j-k, LR White resin sections of Arabidopsis nectaries in wild-type and sweet9-1 mutants stained with Lugol's iodine solution. Starch grains (dark red) accumulate in nectaries of sweet9-1 mutants (k) and in stomata of wild-type nectary (j, *). Starch grains in floral stalks and nectaries in wild-type and sweet9 mutant lines at anthesis. Cell walls stained with safranin-O (orange).

[0014] FIG. 3 depicts that sucrose phosphate synthase 1 (SPS1) and SPS2 are necessary for nectar secretion in Arabidopsis. a-b, Artificial microRNA inhibition of the expression of SPS1 and SPS2 genes lead to a loss of nectar secretion. Arrow indicates the nectar secreted by wild-type flowers. c-d, MicroRNA inhibition of the expression of SPS1 and SPS2 genes altered starch accumulation in the nectaries compared with wild-type. Starch accumulated in the floral stalk of sps1f/2f mutant lines (red arrow) and only in guard cells of wild-type nectaries. e, Proposed model for the mechanism of nectar secretion: starch-derived sucrose is synthesized in nectaries by SPSs and exported by SWEET9. The exported sucrose is subsequently hydrolyzed by CWINV4, which creates a high osmotic potential in order to sustain water flow down the osmotic gradient.

[0015] FIG. 4 depicts that SWEET9 in B. rapa (BrSWEET9) and N. attenuata (NaSWEET9) are essential for nectar secretion. a, Nectar droplets in lateral nectary of wild-type B. rapa flowers. b and c, Lack of nectar in brsweet9-1 and brsweet9-2 mutants. d, NaSWEET9 transcript accumulation in N. attenuata. e, Mean (±SEM) nectar volume of flowers measured at 5 am in wild-type, nasweet9-1 and nasweet9-2 plants. f and g, Sucrose uptake (f) and efflux (g) activity of NaSWEET9 in oocytes. Truncated version of NaSWEET9_L201* (NaSWEET9m) served as control. f, Oocyte uptake: NaSWEET9 mediates ¹⁴C-sucrose uptake (±SEM, n≧14), **t significant at P<0.01. g, ¹⁴C-sucrose efflux by NaSWEET9 in oocytes (±SEM, n≧8). h, Data were collected from available genome databases (phytozome.org, genomevolution.org, bioinformatics.psb.ugent.be/plaza/) using SWEET9 protein sequence as bait, while the tree was generated using genomevolution.org as reference, and then confirmed accordingly with results shown in Davies et al. (Proc Natl Acad Sci USA. 2004 Feb. 17, 101(7):1904-9). Tree branches are a schematic representation and they are not defined by any real bootstrap value. Species belonging to the Core Eudicots clades of Rosids or Asterids are underlined in orange and yellow, respectively.

[0016] FIG. 5 depicts seed coat expression and mutant phenotype for SWEETs in Arabidopsis. (A) SWEET11-GFP. (B) Starch in wild-type embryos, 8 DAF. (C) A triple mutant of sweet11, 12, 15 (8 DAF) shows retarded development and reduced starch content.

[0017] FIG. 6 depicts GFP fusions of SWEET4a, SWEET4b, SWEET4d and SWEET11 localize to the plasma membrane in tobacco. Transient expression in Agrobacterium-infiltrated N. benthamiana leaves demonstrated strong localization of SWEET4a, SWEET4b, SWEET4d and SWEET11 (GFP C-term fusion) at the Plasma Membrane. Fluorescent signals were visualized using confocal laser scanning microscopy, 3 days after Agrobacterium infiltration.

[0018] FIG. 7 depicts (A) the function of SWEET4a and SWEET 4b (from maize) as hexose transporters, and (B) the function of SWEET11 (from maize) as a sucrose transporter. Identification of glucose or sucrose transport activity was carried by co-expression with cytosolic FRET glucose or sucrose sensors in HEK293T cells (FLIPglu600μD13V and FLIPsuc90mΔ1V respectively). Individual cells were analyzed by quantitative ratio imaging of CFP and Venus emission (acquisition interval 10s). Co-transfected HEK293T cells were perfused with medium, followed by pulses of 2 mM-5 mM-20 mM glucose or 10 mM Sucrose. HEK293T cells transfected with sensors only (“control”) as controls. SWEET4d is a glucose transporter such as SWEET4a and 4b.

[0019] FIG. 8 depicts an insertional allele mutant of SWEET4d in corn. (A) Shows 15DAP kernel phenotype with the wild-type on the left and the mutant on the right: the mutant shows overall reduction in size/weight of about 60% compared to the wild-type kernel. (B) Shows the sagittal cut of wild-type (left) and mutant (right) kernels: both the embryo and the endosperm seem to be heavily affected by the sweet4d mutation, while the maternal pericarp collapses showing an “empty pericarp” phenotype. (C) Shows a corn plant heterozygous for the insertional allele (left) and a homozygous plant (right) for the insertional allele. (D) Schematic drawing of the construct carrying the insertional allele (Mutator) into the last exon. (E) Shows IKI starch staining of the mutant (left) and wild-type (right) corn kernels: in wild-type condition the starch is mostly accumulated within the endosperm and few grains into the root meristem to sustain early germination. In the mutant the endosperm still accumulates starch but its size is dramatically affected, and most of the starch seems to be stored into the embryo.

[0020] FIG. 9 depicts the localized expression of SWEETs 11 and 15 in developing seeds of transgenic Arabidopsis carrying native promoter driving SWEET-GFP, respectively.

[0021] FIG. 10 depicts the comparison of the embryo phenotype among wild-type (Col), single (sweet15), double (sweet11,12, sweet11,15) and triple mutants (sweet11,12,15) at 8 DAF (Days After Flowering). Embryo of double mutants sweet11,12 and sweet11,15 shows slightly smaller than Col. Triple mutant sweet11,12,15 dramatically delays embryo growth

[0022] FIG. 11 depicts the comparison of starch accumulation in embryos of the wild-type (Col), single (sweet15), the triple mutants (sweet11,12,15) and the double mutant (sweet11,12) both at 8 and 11DAF. After siliques were stained for 5 min with Lugol's iodine solution and washed twice with water, embryos were dissected to take pictures. Embryo from triple mutant sweet11,12,15 accumulates less starch than sweet11,12 or Col and embryo from sweet11,12 has more starch than sweet11,12,15, less starch than Col

[0023] FIG. 12 depicts a phylogenetic analysis of the 23 Zea mays SWEETs and the 17 SWEET family members from Arabidopsis (At). To further explore the relationship of maize and Arabidopsis SWEETs a phylogenetic tree was constructed (MEGA 5.1) using the closest amino acid sequences from Arabidopsis obtained by a BlastP search of the Phytozome.net non-redundant protein database. The tree demonstrates that also the maize SWEET fall into the SWEET 4 Clades as defined in Arabidopsis.

[0024] FIG. 13 depicts amino acid alignment of SWEET4a, 4b and 4d in maize. Asterisks represent the conserved amino acids. Very high homology is observed throughout the all sequences, but decreases drastically within the C-term.

[0025] FIG. 14 depicts expression of various SWEETs at various stages of seed development. In this figure, the development pattern follows Arabidopsis SWEET expression. Abbreviation: A, absent; INS, inconsistent detection between biological replicas; M, marginal; P, present. Abbreviation of Stage and Tissue/Compartment: Stage: PGLOB—Pre-Globular Stage; GLOB—Globular Stage; HRT—Heart Stage; LCOT—Linear Cotyledon Stage; MG—Maturation Green Stage. Tissue: CZE—Chalazal Endosperm; CZSC—Chalazal Seed Coat; EP—Embryo Proper; GSC—General Seed Coat; :MCE—Micropylar Endosperm; PEN—Peripheral Endosperm; S—Suspensor; WS—Whole Seed. Signal Intensities (relative mRNA) and signal detection calls (P, A, or M) were generated using MAS 5.0 algorithm. For comparative purposes, GeneChip data were scaled globally to a target intensity of 500 for all probe sets on the chip using MAS 5.0 default parameters. Each probe set was manually assigned a consensus detection call based on the MAS 5.0 detection calls of both biological replicates of an RNA sample. Probe sets with same signal detection calls in both biological replicates were assigned consensus detection calls of P, A, or M, respectively. By contrast, probe sets with different or discordant detection calls for the two biological replicates (e.g., P and A; P and M) were assigned a consensus detection call of Insufficient (INS).

[0026] FIG. 15 depicts translational expression of SWEET12 in early seeds development stage. GFP signal was observed in seed coat and suspensor by confocal microscopy.

[0027] FIG. 16 depicts translational expression of SWEET15 in different development stages of seeds. SWEET15 localizes to the PM of the outmost layer of seed coat. GFP signal was also visualized in the endosperm at linear cotyledon stage.

[0028] FIG. 17 depicts the ability of SWEET11, 12 and 15 to uptake sucrose in oocytes. cRNA of SWEET11, 12 and 15 was injected into oocytes. ¹⁴C-sucrose uptake was measured after 2-day expression.

[0029] FIG. 18 depicts Arabidopsis embryo development being delayed in a triple mutant of SWEET 11, 12 and 15. The embryo of triple mutant sweet11,12,15 was mainly arrested from 5 DAF. Images were taken in cleared seeds at different stages by differential interference contrast (DIC) microscopy

[0030] FIG. 19 depicts the seed yield of triple mutants of SWEET11, 12 and 15 is lower than that of wild-type Arabidopsis. The sweet11,12 mutant had lower seeds yield than control and higher than sweet11,12,15. Either sweet11,12,15 or sweet11,12 doesn't affect the number of seeds per silique.

[0031] FIG. 20 depicts the ability of sucrose to partially rescue root growth of the triple mutant (SWEET11, 12 and 15) when sucrose is added to the growth medium in 5 day-old seedlings.

[0032] FIG. 21 depicts the maternal control of seed development being severely impaired in Arabidopsis triple mutant (SWEET11, 12, 15). (A) Two control plants that were crossed show normal seed development at 8DAF. (B) A maternal control was crossed with a paternal triple mutant and the resulting seeds appeared to develop normally at 8DAF. (C) A paternal control was crossed with a maternal triple mutant and the development of the resulting seeds was severely impaired at 8DAF. (D) A paternal triple mutant was crossed with a maternal triple mutant and the development of the resulting seeds was severely impaired at 8DAF. (E) Shows the surface area of the developing seedlings.

[0033] FIG. 22 depicts upregulation of SWEET11 in maize mutants in which starch biosynthesis/accumulation is defective. WT-wild-type; ae wx-amylose extender/waxy double mutant; sh1-shruken-1 mutant. Values are on Log scale. Construct in the bottom panel is a schematic representation of the gene SWEET11 and the 2 insertional alleles (DS-ANT and DS-ALV) created by remobilizing an endogenous DS transposon.

[0034] FIG. 23 depicts upregulation of SWEET11 in maize in leaves treated 3 days with lanolin and gibberellic acid (GA₃). Young leaves (8 weeks) were spread with a mix of Lanolin and GA₃ for 4 days. Lanolin and GA₃ were then removed to improve RNA extraction. qPCR was carried out using 18S gene as internal standard. Values represent the relative expression of SWEET11 normalized by the internal standard.

[0035] FIG. 24 depicts sagittal sections of wild-type and sweet4d mutant phloem termini and BETL. Starch staining was performed leaving the ultrathin (1 m) slides in a saturated IKI solution for 30 min. Black dots are starch grains and they accumulate preferentially within the maternal phloem termini in sweet4d maize mutants.

[0036] FIG. 25 depicts aberrant basal endosperm transfer layer (BETL) morphology with no visible cell wall ingrowths or cell organization in SWEET4d maize mutants. Slides were stained with Safranin to highlight cell wall morphology.

[0037] FIG. 26 depicts a weblogo of sequence alignment data of Arabidopsis SWEETs showing conserved amino acid sequences. The size of the letter in the weblogo represents the degree of conservation of amino acid sequences among various SWEETs.

[0038] FIG. 27 depicts a weblogo of sequence alignment data of Arabidopsis SWEETs showing conserved amino acid sequences. The size of the letter in the weblogo represents the degree of conservation of amino acid sequences among various SWEETs.

### DETAILED DESCRIPTION OF THE INVENTION

[0039] The present invention relates to methods of increasing the levels of at least one sugar in developing seeds in a plant, with the methods comprising inserting an exogenous nucleic acid, which codes for at least one sugar transporter protein (SWEET protein), into a plant cell to create a transgenic plant cell, and subjecting the transgenic plant cell to conditions that promote expression of the at least one SWEET protein during seed development. The methods results in transgenic plant seeds, and transgenic plants that produce seed, where the levels of at least one sugar are increased as compared to seeds from non-transgenic plants of the same species grown under the same conditions.

[0040] The SWEET proteins, in general, belong to the PFAM family “MtN3_slv” (Accession No. PF03083). See pfam.sanger.ac.uk, which is a database of protein families that are determined and represented by multiple sequence alignments and hidden Markov models (HMMs). In one embodiment of the present invention, the SWEET transporter proteins utilized in the methods, constructs, plants and plant seeds of the present invention are uniporters, which is a well-known term in the art that means a protein that facilitates transport through facilitated diffusion, i.e., the molecules being transported are being transported with the solute gradient. Uniporters do not typically utilize energy for movement of the molecules they transport, other than harnessing the solute gradient.

[0041] SWEET proteins are well-known in the art, and their primary amino acid structures can be found in a variety of databases including but not limited to plant membrane protein databases such as aramemnon.botanik.uni-koeln.de, C. elegans protein databases such as www.wormbase.org, and even in human transporter databases, such as www.tcdb.org. In general SWEETs have a characteristic modular structure that is different from other sugar transporters. For example, SWEETs have a different three-dimensional structure from lac permease, yeast hexose transporters, human GLUTs or human SGLTs. The basic unit of a SWEET transporter is a domain composed of three transmembrane domains (TMs). In bacteria, proteins with 3 TMs have to form at least one dimer to create a sugar transporting pore. The eukaryotic versions of the SWEET proteins contain a repeat of this subunit, which is separated by an additional TM domain. This additional TM domain (“TM4”) is not conserved amongst family members, thus the specific amino acid sequence of this domain is not critical to proper functioning across the kingdom of SWEET proteins. This additional TM4 domain serves as an inversion linker that puts the two repeat units of 3 TMs into a parallel configuration, which is how the dimer is formed with the bacterial protein. This 7 TM structure is unique from all other known sugar transporters. That the animal versions of these SWEET proteins as well as bacterial proteins from this same family all transport sugars is indicative that the plant version of these SWEET proteins sugar transporters.

[0042] Members of the SWEET transporter superfamily are defined both by conserved amino acid sequences and structural features. For example, all SWEETs are composed of 7 TM divided in two conserved MtN3/saliva motifs embedded in the tandem 3 TM repeat unit, which is connected by a central TM helix that is less conserved, indicating that this central TM serves as a linker. The resulting structure has been described as the 3-1-3 TM SWEET structure.

[0043] The first TM domain on average is predicted to be composed of 23 amino acids, but could vary between 20 and 25. Within this TM domain there are at least 4 highly conserved amino acids: G, P, T and F.

[0044] The second TM domain on average is predicted to be composed of 19 amino acids, but could vary between 16 and 23. Within this TM domain there are at least 3 highly conserved amino acids: P, Y and Y.

[0045] The third TM domain on average is predicted to be composed of 23 amino acids, but could vary between 20 and 25. Within this TM domain there are at least 3 highly conserved amino acids: T, N and G.

[0046] The fifth TM domain on average is predicted to be composed of 23 amino acids, but could vary between 20 and 25. Within this TM domain there are at least 3 highly conserved amino acids: G, P and L.

[0047] The fifth loop, linking together TM 5 and 6, has 2 highly conserved amino acids: V and T.

[0048] The sixth TM domain on average is predicted to be composed of 23 amino acids, but could vary between 19 and 25. Within this TM domain there are at least 7 highly conserved amino acids: S, V, M, P, L, S and Y.

[0049] The sixth loop, linking together TM 6 and 7, has a highly conserved amino acid: D.

[0050] The seventh TM domain on average is predicted to be composed of 23 amino acids, but could vary between 20 and 25. Within this TM domain there are at least 5 highly conserved amino acids: P, N, G, Q and Y.

[0051] Both sugar transport and the seven TM three-dimensional structure are the two key features for this superfamily of proteins. Despite the great variability in size or sequence, and despite the broad number of organisms from which they can be isolated, all SWEETs tested using different heterologous systems have shown sugar transport function.

[0052] In one embodiment of the present invention, the SWEET transporter proteins utilized in the methods, constructs, plants and plant seeds of the present invention are sucrose or hexose uniporters. A hexose uniporter is, as the name implies, a transporter protein that transports hexose sugars, e.g., cyclic hexoses, aldohexoses and ketohexoses. Examples of sucrose or hexose uniporters that may be utilized in the methods, constructs, plants and plant seeds of the present invention include but are not limited to glucose uniporters and fructose uniporters.

[0053] In general, SWEETs from a particular species of plant can be categorized into clades, or groups, based on amino acid sequence similarity. In maize, for example there are four clades of SWEET proteins based on sequence similarity within each Glade. For example, Clade I in Zea mays contains SWEETS 1a, 1b, 2, 3a and 3b; Clade II contains SWEETs 4a, 4b, 4d, 6a and 6b; Clade III contains SWEETs 11, 12a, 12b, 13a, 13b, 13c, 14a, 14b, 15a and 15b; Clade IV contains SWEETs 16a, 16b and 17. The number of the specific SWEET protein in maize is used to reflect the phylogenetic relationship to Arabidopsis SWEETs, e.g., SWEET11 in maize is most closely related, by sequence comparison, to SWEET 11 in Arabidopsis, and smaller letters are used to indicate a possible gene amplification relative to Arabidopsis.

[0054] Accordingly, the numbering of the SWEET proteins, e.g., SWEET 1, SWEET 2, etc., refers to the amino acid sequence of that specific SWEET protein as derived from Arabidopsis thaliana, as well as orthologs in other species, based on amino acid sequence comparison. Thus, although the gene and protein nomenclature refers to genes and proteins identified in The Arabidopsis Information Resource (TAIR) database, which is available on the worldwide web at www.arabidopsis.org, it is understood that the invention is not limited to genes and proteins only in Arabidposis and that the invention encompasses orthologs of genes in other species. For example, it is understood that the methods, constructs, plants and plant seeds of the present invention utilizing the transporter(s) encoded by the genes AtSweet1-At1G21460, AtSweet2-At3G14770, AtSweet3-At5G53190, AtSweet4-At3G28007, AtSweet5-At5G62850, AtSweet6-At1G66770, AtSweet7-At4G10850, AtSweet8-At5G40260, AtSweet9-At2G39060, AtSweet10-At5G50790, AtSweet11-At3G48740, AtSweet12-At5G23660, AtSweet13-At5G50800, AtSweet14-At4G25010, AtSweet15-At5G13170, AtSweet16-At3G16690 and AtSweet17-At4G15920 in Arabidopsis (accession numbers following the gene name, e.g., “At1G21460,” refer accession numbers from the TAIR database, as described above) to can be applied to methods, constructs, plants and plant seeds utilizing the transporter(s) encoded by the orthologous genes in another species. As used herein, orthologous genes are genes from different species that perform the same or similar function and are believed to descend from a common ancestral gene and thus share a certain amount of amino acid identities in their sequence. Often, proteins encoded by orthologous genes have similar or nearly identical amino acid sequence identities to one another, and the orthologous genes themselves have similar nucleotide sequences, particularly when the redundancy of the genetic code is taken into account. Thus, by way of example, the ortholog of a sucrose transporter in Arabidopsis would be a sucrose transporter in another species of plant, regardless of the amino acid sequence of the two proteins.

[0055] In specific embodiments, the SWEET transporter proteins used in methods, constructs, plants and plant seeds of the present invention are SWEET proteins from crops plants, such as a food crops, feed crops or biofuels crops. Exemplary important crops may include corn, wheat, soybean, cotton and rice. Crops also include corn, wheat, barley, triticale, soybean, cotton, millet, sorghum, sugarcane, sugar beet, potato, tomato, grapevine, citrus (orange, lemon, grapefruit, etc), lettuce, alfalfa, common bean, fava bean and strawberries, sunflowers and rapeseed, cassava, miscanthus and switchgrass. Other examples of plants include but are not limited to an African daisy, African violet, alfalfa, almond, anemone, apple, apricot, asparagus, avocado, azalea, banana and plantain, beet, bellflower, black walnut, bleeding heart, butterfly flower, cacao, caneberries, canola, carnation, carrot, cassava, diseases, chickpea, cineraria, citrus, coconut palm, coffee, common bean, maize, cotton, crucifers, cucurbit, cyclamen, dahlia, date palm, douglas-fir, elm, English walnut, flax, Acanthaceae, Agavaceae, Araceae, Araliaceae, Araucariacea, Asclepiadaceae, Bignoniaceae, Bromeliaceae, Cactaceae, Commelinaceae, Euphobiaceae, Gentianaceae, Gesneriaceae, Maranthaceae, Moraceae, Palmae, Piperaceae, Polypodiaceae, Urticaceae, Vitaceae, fuchsia, geranium, grape, hazelnut, hemp, holiday cacti, hop, hydrangea, impatiens, Jerusalem cherry, kalanchoe, lettuce, lentil, lisianthus, mango, mimulus, monkey-flower, mint, mustar, oats, papaya, pea, peach and nectarine, peanut, pear, pearl millet, pecan, pepper, Persian violet, pigeonpea, pineapple, pistachio, pocketbook plant, poinsettia, potato, primula, red clover, rhododendron, rice, rose, rye, safflower, sapphire flower, spinach, strawberry, sugarcane, sunflower, sweetgum, sweet potato, sycamore, tea, tobacco, tomato, verbena, and wild rice.

[0056] Based on the description of the amino acid sequences of SWEET transporters disclosed herein, one of skill could easily identify any SWEET transporter from virtually any plant species. Once identified, one of skill in the art can use readily available methods for isolating the coding sequence of the identified SWEET protein from a given species to produce nucleic acids encoding the desired SWEET proteins.

[0057] In specific embodiments, the SWEET proteins used in methods, constructs, plants and plant seeds of the present invention are SWEET proteins from Zea mays. Examples of nucleic acid sequences and/or amino acid sequences of the SWEET proteins include but are not limited to ZmSweet1a-GRMZM2G039365, ZmSweet1b-GRMZM2G153358, ZmSweet2-GRMZM2G324903, ZmSweet3a-GRMZM2G179679, ZmSweet3b-GRMZM2G060974, ZmSweet4a-GRMZM2G000812, ZmSweet4b-GRMZM2G144581, ZmSweet4d-GRMZM2G137954, ZmSweet6a-GRMZM2G157675, ZmSweet6b-GRMZM2G416965, ZmSweet11-GRMZM2G368827, ZmSweet12a-GRMZM2G133322, ZmSweet12b-GRMZM2G099609, ZmSweet13a-GRMZM2G173669, ZmSweet13b-GRMZM2G021706, ZmSweet13c-GRMZM2G179349, ZmSweet14a-GRMZM2G094955, ZmSweet14b-GRMZM2G015976, ZmSweet15a-GRMZM2G168365, ZmSweet15b-GRMZM5G872392, ZmSweet16a-GRMZM2G106462, ZmSweet16b-GRMZM2G111926, ZmSweet17-GRMZM2G107597. Accession numbers following the gene name, e.g., “GRMZM2G039365,” refer accession numbers from the Maize Genetics and Genomics database at www.maizegdb.org as described above.

[0058] In specific embodiments, the SWEET proteins used in methods, constructs, plants and plant seeds of the present invention are SWEET proteins from Orya sativa. Examples of nucleic acid sequences and/or amino acid sequences of the SWEET proteins include but are not limited to OsSweet1a-Os01g65880, OsSweet1b-Os05g35140, OsSweet2a-Os01g36070, OsSweet2b-Os01g50460, OsSweet3a-Os05g12320, OsSweet3b-Os01g12130, OsSweet4-0s02g19820, OsSweet5-0s05g51090, OsSweet6a-Os01g42110, OsSweet6b-Os01g42090, OsSweet7a-Os09g08030, OsSweet7b-Os09g08440, OsSweet7c-Os12g07860, OsSweet7d-Os09g08490, OsSweet7e-Os09g08270, OsSweet11-0s08g42350, OsSweet12-Os03g22590, OsSweet13-Os12g29220, OsSweet14-Os11g31190, OsSweet15-Os02g30910, OsSweet16-Os03g22200. Accession numbers following the gene name, e.g., “Os01g65880,” refer accession numbers from the Greenphyl database (version 4) at www.greenphyl.org as described herein, or the TIGR database at ice.plantbiology.msu.edu.

[0059] In specific embodiments, the SWEET proteins used in methods, constructs, plants and plant seeds of the present invention are SWEET proteins from Arabidopsis thaliana. Examples of nucleic acid sequences and/or amino acid sequences of the SWEET proteins include but are not limited to AtSweet1-At1G21460, AtSweet2-At3G14770, AtSweet3-At5G53190, AtSweet4-At3G28007, AtSweet5-At5G62850, AtSweet6-At1G66770, AtSweet7-At4G10850, AtSweet8-At5G40260, AtSweet9-At2G39060, AtSweet10-At5G50790, AtSweet11-At3G48740, AtSweet12-At5G23660, AtSweet13-At5G50800, AtSweet14-At4G25010, AtSweet15-At5G13170, AtSweet16-At3G16690, AtSweet17-At4G15920. Accession numbers following the gene name, e.g., “At5G23660,” refer accession numbers from the TAIR database as described above.

[0060] In specific embodiments, the SWEET proteins used in methods, constructs, plants and plant seeds of the present invention are SWEET proteins from Medicago truncatula. Examples of nucleic acid sequences and/or amino acid sequences of the SWEET proteins include but are not limited to MtSWEET2b-AC235677_9, MtSWEET3c-Medtr1g028460, MtSWEET1a-Medtr1g029380, MtSWEET15a-Medtr2g007890, MtSWEET6-Medtr3g080990, MtSWEET1b-Medtr3g089125, MtSWEET3a-Medtr3g090940, MtSWEET3b-Medtr3g090950, MtSWEET13-Medtr3g098910, MtSWEET11-Medtr3g098930, MtSWEET4-Medtr4g106990, MtSWEET15b-Medtr5g067530, MtSWEET9a-Medtr5g092600, MtSWEET5a-Medtr6g007610, MtSWEET5c-Medtr6g007623, MtSWEET5d-Medtr6g007633, MtSWEET5b-Medtr6g007637, MtSWEET2c-Medtr6g034600, MtSWEET9b-Medtr7g007490, MtSWEET15d-Medtr7g405710, MtSWEET15c-Medtr7g405730, MtSWEET2a-Medtr8g042490, MtSWEET14-Medtr8g096310, MtSWEET12-Medtr8g096320, MtSWEET7-Medtr8g099730, MtSWEET16-Mtr.42164.1.S1. Accession numbers following the gene name, e.g., “Medtr1g028460,” refer accession numbers from the legume genome database at www.plantgrn.noble.org as described herein

[0061] In specific embodiments, the SWEET proteins used in methods, constructs, plants and plant seeds of the present invention are SWEET proteins from Glycine max. Examples of nucleic acid sequences and/or amino acid sequences of the SWEET proteins include but are not limited to GmSWEET1a-XP003526670, GmSWEET1b-Glyma13g09140, GmSWEET1c-Glyma14g27610, GmSWEET2-XP003540515, GmSWEET3a-XP003544116, GmSWEET3b-Glyma13g08190, GmSWEET3c-ACU24301, GmSWEET3d-Glyma04g41680, GmSWEET4-Glyma17g09840, GmSWEET5a-Glyma19g01280, GmSWEET5b-Glyma19g01270, GmSWEET6a-Glyma20g16160, GmSWEET6b-Glyma13g10560.1, GmSWEET7-Glyma08g02890, GmSWEET9a-XP00355271, GmSWEET9b-XP003552719, GmSWEET9c-Glyma08g48281, GmSWEET10a-XP003532478, GmSWEET10b-Glyma05g38340, GmSWEET10c-NP001237418, GmSWEET10d-XP003523161, GmSWEET10e-Glyma06g17540, GmSWEET11a-XP003532471, GmSWEET11b-Glyma05g38351, GmSWEET12a-Glyma04g37530, GmSWEET12b-XP003526939, GmSWEET15a-Glyma08g19580, GmSWEET15b-Glyma15g05470, GmSWEET15c-XP003524088, GmSWEET15d-XP003551863, GmSWEET15e-Glyma08g47561, GmSWEET15f-Glyma18g53930, GmSWEET16a-Glyma09g04840, GmSWEET16b-Glyma15g16030, GmSWEET17-Glyma19g42040. Accession numbers following the gene name, e.g., “Glyma19g42040,” refer accession numbers from the legume genome database at www.plantgrn.noble.org or the Phytozome database at www.photozome.net, as described herein.

[0062] In other embodiments, the methods, constructs, plants and plant seed of the present invention may comprise or comprise the use of at least one exogenous nucleic acid encoding a SWEET protein or variant thereof, wherein the exogenous nucleic acid encodes a SWEET or variant thereof comprising an amino acid sequence that is at least 75%, 80%, 85%, 86%, 87%, 88%, 89%, 90%, 91%, 92%, 93%, 94%, 95%, 96%, 97%, 98% or 99% identical to any one of the amino acid sequences of SEQ ID NOs: 1-410. In another embodiment, the methods, constructs, plants and plant seed of the present invention may comprise or comprise the use of at least one exogenous nucleic acid encoding a SWEET protein or variant thereof, wherein the exogenous nucleic acid encodes a SWEET or variant thereof consists of an amino acid sequence that is at least 75%, 80%, 85%, 86%, 87%, 88%, 89%, 90%, 91%, 92%, 93%, 94%, 95%, 96%, 97%, 98% or 99% identical to any one of the amino acid sequences of SEQ ID NOs: 1-410.

TABLE I
List of Sequences

| Organisms | | Gene name | Gene ID | Function |
|---|---|---|---|---|
| Arabidopsis | 1 | AtSWEET1 | AT1G21460 | sugar |
| thaliana | | | | transport |
| | 2 | AtSWEET2 | A13G14770 | sugar |
| | | | | transport |
| | 2 | AtSWEET3 | AT5G53190 | sugar |
| | | | | transport |
| | 3 | AtSWEET4 | AT3G28007 | sugar |
| | | | | transport |
| | 3 | AtSWEET5 | AT5G62850 | sugar |
| | | | | transport |
| | 4 | AtSWEET6 | AT1G66770 | sugar |
| | | | | transport |
| | 4 | AtSWEET7 | AT4G10850 | sugar |
| | | | | transport |
| | 5 | AtSWEET8 | AT5G40260 | sugar |
| | | | | transport |
| | 5 | AtSWEET9 | AT2G39060 | sugar |
| | | | | transport |
| | 6 | AtSWEET10 | AT5G50790 | sugar |
| | | | | transport |
| | 6 | AtSWEET11 | AT3G48740 | sugar |
| | | | | transport |
| | 7 | AtSWEET12 | AT5G23660 | sugar |
| | | | | transport |
| | 7 | AtSWEET13 | AT5G50800 | sugar |
| | | | | transport |
| | 8 | AtSWEET14 | AT4G25010 | sugar |
| | | | | transport |
| | 8 | AtSWEET15 | AT5G13170 | sugar |
| | | | | transport |
| | 9 | AtSWEET16 | AT3G16690 | sugar |
| | | | | transport |
| | 9 | AtSWEET17 | AT4G15920 | sugar |
| | | | | transport |
| Nicotiana | 10 | NaSWEET9 | NEC1-Q9FPN0 | sugar |
| attenuata | | | | transport |
| Brassica rapa | 10 | BrSWEET9 | AGO61984 | sugar |
| | | | | transport |
| Populus | 11 | PtSWEET10a | Potri.015G101400 | sugar |
| trichocarpa | | | | transport |
| Lotus | 11 | LjSWEET3 | BT145500 | sugar |
| japonicus | | | | transport |
| Oryza sativa | 12 | OsSweet1a | Os01g0881300 | sugar |
| | | | | transport |
| | 13 | OsSweet1b | Os05g0426000 | sugar |
| | | | | transport |
| | 14 | OsSweet2a | Os01g0541800 | sugar |
| | | | | transport |
| | 15 | OsSweet2b | Os01g0700100 | sugar |
| | | | | transport |
| | 16 | OsSweet4 | Os02g0301100 | sugar |
| | | | | transport |
| | 17 | OsSweet11 | Os08g0535200 | sugar |
| | | | | transport |
| | 18 | OsSweet12 | Os03g0347500 | sugar |
| | | | | transport |
| | 19 | OsSweet13 | Os12g0476200 | sugar |
| | | | | transport |
| | 20 | OsSweet14 | Os11g0508600 | sugar |
| | | | | transport |
| Zea mays | 21 | ZmSWEET4a | GRMZM2G000812 | sugar |
| | | | | transport |
| | 22 | ZmSWEET4b | GRMZM2G144581 | sugar |
| | | | | transport |
| | 23 | ZmSWEET4d | GRMZM2G137954 | sugar |
| | | | | transport |
| | 24 | ZmSWEET11 | GRMZM2G368827 | sugar |
| | | | | transport |
| Medicago | 25 | MtSWEET11 | Medtr3g098930 | sugar |
| truncatula | | | | transport |
| Glycine max | 26 | GmSWEET11 | Glyma06g17530.1 | sugar |
| | | | | transport |
| Mus musculus | 27 | MmSWEET1 | MmRAG1_AP1 | sugar |
| | | | | transport |
| Homo sapiens | 28 | HsSWEET1 | HsRAG1_AP1 | sugar |
| | | | | transport |
| Caenorhabditis | 29 | CeSWEET1 | CeK02D7_5 | sugar |
| elegans | | | | transport |
| Xenopus laevis | 30 | XISWEET1 | NP_001084504 | sugar |
| | | | | transport |
| Brady- | 31 | BjSemiSWEET1 | bsr6460 | sugar |
| rhizobium | | | | transport |
| japonicum | | | | |

[0063] The invention relates to isolated nucleic acids encoding a SWEET, or variant thereof, and to constructs, cells, host cells, plant tissue and plant seeds comprising these nucleic acids. The nucleic acids of the invention can be DNA or RNA. The nucleic acid molecules can be double-stranded or single-stranded RNA or DNA; single stranded RNA or DNA can be the coding, or sense, strand or the non-coding, or antisense, strand. In particular, the nucleic acids may encode any SWEET or variant thereof, as well as fusion proteins. For example, the nucleic acids of the invention include polynucleotide sequences that encode glutathione-S-transferase (GST) fusion protein, poly-histidine (e.g., His6), poly-HN, poly-lysine, hemagglutinin, HSV-Tag. If desired, the nucleotide sequence of the isolated nucleic acid can include additional non-coding sequences such as non-coding 3′ and 5′ sequences (including regulatory sequences, for example).

[0064] The nucleic acid molecules of the invention can be “isolated.” As used herein, an “isolated” nucleic acid molecule or nucleotide sequence is intended to mean a nucleic acid molecule or nucleotide sequence that is not flanked by nucleotide sequences normally flanking the gene or nucleotide sequence (as in genomic sequences) and/or has been completely or partially removed from its native environment, e.g., a cell, tissue. For example, nucleic acid molecules that have been removed or purified from cells are considered isolated. In some instances, the isolated material will form part of a composition, for example, a crude extract containing other substances, buffer system or reagent mix. In other circumstances, the material may be purified to near homogeneity, for example as determined by PAGE or column chromatography such as HPLC. Thus, an isolated nucleic acid molecule or nucleotide sequence can includes a nucleic acid molecule or nucleotide sequence which is synthesized chemically, using recombinant DNA technology or using any other suitable method. To be clear, a nucleic acid contained in a vector would be included in the definition of “isolated” as used herein. Also, isolated nucleotide sequences include recombinant nucleic acid molecules, e.g., DNA, RNA, in heterologous organisms, as well as partially or substantially purified nucleic acids in solution. “Purified,” on the other hand is well understood in the art and generally means that the nucleic acid molecules are substantially free of cellular material, cellular components, chemical precursors or other chemicals beyond, perhaps, buffer or solvent. “Substantially free” is not intended to mean that other components beyond the novel nucleic acid molecules are undetectable. The nucleic acid molecules of the present invention may be isolated or purified. Both in vivo and in vitro RNA transcripts of a DNA molecule of the present invention are also encompassed by “isolated” nucleotide sequences.

[0065] The invention also encompasses variations of the nucleotide sequences of the invention, such as those encoding functional fragments or variants of the polypeptides as described herein. Such variants can be naturally-occurring, or non-naturally-occurring, such as those induced by various mutagens and mutagenic processes. Intended variations include, but are not limited to, addition, deletion and substitution of one or more nucleotides which can result in conservative or non-conservative amino acid changes, including additions and deletions.

[0066] The invention described herein also relates to fragments of the isolated nucleic acid molecules described herein. The term “fragment” is intended to encompass a portion of a nucleotide sequence described herein which is from at least about 20 contiguous nucleotides to at least about 50 contiguous nucleotides or longer in length. Such fragments may be useful as probes and primers. In particular, primers and probes may selectively hybridize to the nucleic acid molecule encoding the polypeptides described herein. For example, fragments which encode polypeptides that retain activity, as described below, are particularly useful.

[0067] The invention also provides nucleic acid molecules that hybridize under high stringency hybridization conditions, such as for selective hybridization, to the nucleotide sequences described herein (e.g., nucleic acid molecules which specifically hybridize to a nucleotide sequence encoding polypeptides described herein and encode a modified growth factor isooherin). Hybridization probes include synthetic oligonucleotides which bind in a base-specific manner to a complementary strand of nucleic acid. Suitable probes include polypeptide nucleic acids, as described in Nielsen et al., Science, 254:1497-1500 (1991).

[0068] Such nucleic acid molecules can be detected and/or isolated by specific hybridization e.g., under high stringency conditions. “Stringency conditions” for hybridization is a term of art that refers to the incubation and wash conditions, e.g., conditions of temperature and buffer concentration, which permit hybridization of a particular nucleic acid to a second nucleic acid; the first nucleic acid may be perfectly complementary, i.e., 100%, to the second, or the first and second may share some degree of complementarity, which is less than perfect, e.g., 60%, 75%, 85%, 95% or more. For example, certain high stringency conditions can be used which distinguish perfectly complementary nucleic acids from those of less complementarity.

[0069] “High stringency conditions”, “moderate stringency conditions” and “low stringency conditions” for nucleic acid hybridizations are explained in Current Protocols in Molecular Biology, John Wiley & Sons, (1998)), which is incorporated by reference. The exact conditions which determine the stringency of hybridization depend not only on ionic strength, e.g., 0.2×SSC, 0.1×SSC of the wash buffers, temperature, e.g., room temperature, 42° C., 68° C., etc., and the concentration of destabilizing agents such as formamide or denaturing agents such as SDS, but also on factors such as the length of the nucleic acid sequence, base composition, percent mismatch between hybridizing sequences and the frequency of occurrence of subsets of that sequence within other non-identical sequences. Thus, high, moderate or low stringency conditions may be determined empirically.

[0070] By varying hybridization conditions from a level of stringency at which no hybridization occurs to a level at which hybridization is first observed, conditions which will allow a given sequence to hybridize with the most similar sequences in the sample can be determined.

[0071] Exemplary conditions are described in Krause, M. H. and S. A. Aaronson, Methods in Enzymology, 200:546-556 (1991), which is incorporated by reference. Washing is the step in which conditions are usually set so as to determine a minimum level of complementarity of the hybrids. Generally, starting from the lowest temperature at which only homologous hybridization occurs, each degree (° C.) by which the final wash temperature is reduced, while holding SSC concentration constant, allows an increase by 1% in the maximum extent of mismatching among the sequences that hybridize. Generally, doubling the concentration of SSC results in an increase in Tm. Using these guidelines, the washing temperature can be determined empirically for high, moderate or low stringency, depending on the level of mismatch sought. Exemplary high stringency conditions include, but are not limited to, hybridization in 50% formamide, 1 M NaCl, 1% SDS at 37° C., and a wash in 0.1×SSC at 60° C. Example of progressively higher stringency conditions include, after hybridization, washing with 0.2×SSC and 0.1% SDS at about room temperature (low stringency conditions); washing with 0.2×SSC, and 0.1% SDS at about 42° C. (moderate stringency conditions); and washing with 0.1×SSC at about 68° C. (high stringency conditions). Washing can be carried out using only one of these conditions, e.g., high stringency conditions, washing may encompass two or more of the stringency conditions in order of increasing stringency. Optimal conditions will vary, depending on the particular hybridization reaction involved, and can be determined empirically.

[0072] Equivalent conditions can be determined by varying one or more of the parameters given as an example, as known in the art, while maintaining a similar degree of identity or similarity between the target nucleic acid molecule and the primer or probe used. Hybridizable nucleotide sequences are useful as probes and primers for identification of organisms comprising a nucleic acid of the invention and/or to isolate a nucleic acid of the invention, for example. The term “primer” is used herein as it is in the art and refers to a single-stranded oligonucleotide which acts as a point of initiation of template-directed DNA synthesis under appropriate conditions in an appropriate buffer and at a suitable temperature. The appropriate length of a primer depends on the intended use of the primer, but typically ranges from about 15 to about 30 nucleotides. Short primer molecules generally require cooler temperatures to form sufficiently stable hybrid complexes with the template. A primer need not reflect the exact sequence of the template, but must be sufficiently complementary to hybridize with a template. The term “primer site” refers to the area of the target DNA to which a primer hybridizes. The term “primer pair” refers to a set of primers including a 5′ (upstream) primer that hybridizes with the 5′ end of the DNA sequence to be amplified and a 3′ (downstream) primer that hybridizes with the complement of the 3′ end of the sequence to be amplified.

[0073] The nucleic acids described herein can be amplified by methods known in the art. For example, amplification can be accomplished by the polymerase chain reaction (PCR). See PCR Technology: Principles and Applications for DNA Amplification (ed. H. A. Erlich, Freeman Press, NY, N.Y., 1992); PCR Protocols: A Guide to Methods and Applications (eds. Innis, et al., Academic Press, San Diego, Calif., 1990); Eckert et al., PCR Methods and Applications 1:17 (1991); PCR (eds. McPherson et al., IRL Press, Oxford); and U.S. Pat. No. 4,683,202, all of which are incorporated by reference. Other suitable amplification methods include the ligase chain reaction (LCR) (see Wu and Wallace, Genomics, 4:560 (1989), Landegren et al., Science, 241:1077 (1988), both of which are incorporated by reference), transcription amplification (Kwoh et al., Proc. Natl. Acad. Sci. USA, 86:1173 (1989), incorporated by reference), and self-sustained sequence replication (Guatelli et al., Proc. Nat. Acad. Sci. USA, 87:1874 (1990) incorporated by reference) and nucleic acid based sequence amplification (NASBA).

[0074] The present invention also relates to vectors that include nucleic acid molecules of the present invention, host cells that are genetically engineered with vectors of the invention and the production of SWEETs or variants thereof by recombinant techniques.

[0075] The terms “peptide,” “polypeptide” and “protein” are used interchangeably herein. As used herein, an “isolated polypeptide” is intended to mean a polypeptide that has been completely or partially removed from its native environment. For example, polypeptides that have been removed or purified from cells are considered isolated. In addition, recombinantly produced polypeptides molecules contained in host cells are considered isolated for the purposes of the present invention. Moreover, a peptide that is found in a cell, tissue or matrix in which it is not normally expressed or found is also considered as “isolated” for the purposes of the present invention. Similarly, polypeptides that have been synthesized are considered to be isolated polypeptides. “Purified,” on the other hand is well understood in the art and generally means that the peptides are substantially free of cellular material, cellular components, chemical precursors or other chemicals beyond, perhaps, buffer or solvent. “Substantially free” is not intended to mean that other components beyond the peptides or variants thereof are undetectable.

[0076] In specific embodiments, the SWEET proteins used in methods, constructs, plants and plant seeds of the present invention may comprise or comprise the use of a protein or peptide with an amino acid sequence of any one or more of SEQ ID NOs: 1-410.

[0077] In other embodiments, the methods, constructs, plants and plant seed of the present invention may comprise or comprise the use of variants of a SWEET protein. In one embodiment, SWEET variants comprise an amino acid sequence that is at least 75%, 80%, 85%, 86%, 87%, 88%, 89%, 90%, 91%, 92%, 93%, 94%, 95%, 96%, 97%, 98% or 99% identical to any one of the amino acid sequences of SEQ ID NOs: 1-410. In another embodiment, the SWEET variants consist of a peptide with an amino acid sequence that is at least 75%, 80%, 85%, 86%, 87%, 88%, 89%, 90%, 91%, 92%, 93%, 94%, 95%, 96%, 97%, 98% or 99% identical to any one of the amino acid sequences of SEQ ID NOs: 1-410.

TABLE II
List of SEQ IDs

| | SEQ |
|---|---|
| Organism | ID NO. |
| Arabidopsis thaliana | |
| AtSweet1-At1G21460-260876_at | 1 |
| AtSweet2-At3G14770-256548_at | 2 |
| AtSweet3-At5G53190-248245_at | 3 |
| AtSweet4-At3G28007-257271_at | 4 |
| AtSweet5-At5G62850-247424_at | 5 |
| AtSweet6-At1G66770-256371_at | 6 |
| AtSweet7-At4G10850-254956_at | 7 |
| AtSweet8-At5G40260-249401_at | 8 |
| AtSweet9-At2G39060-266201_at | 9 |
| AtSweet10-At5G50790-248496_at | 10 |
| AtSweet11-At3G48740-252327_at | 11 |
| AtSweet12-At5G23660-249800_at | 12 |
| AtSweet13-At5G50800-248467_at | 13 |
| AtSweet14-At4G25010-254090_at | 14 |
| AtSweet15-At5G13170-245982_at | 15 |
| AtSweet16-At3G16690-258421_at | 16 |
| AtSweet17-At4G15920-245524_at | 17 |
| Oryza sativa | |
| OsSweet1a-Os01g65880 | 18 |
| OsSweet1b-Os05g35140 | 19 |
| OsSweet2a-Os01g36070 | 20 |
| OsSweet2b-Os01g50460 | 21 |
| OsSweet3a-Os05g12320 | 22 |
| OsSweet3b-Os01g12130 | 23 |
| OsSweet4-Os02g19820 | 24 |
| OsSweet5-Os05g51090 | 25 |
| OsSweet6a-Os01g42110 | 26 |
| OsSweet6b-Os01g42090 | 27 |
| OsSweet7a-Os09g08030 | 28 |
| OsSweet7b-Os09g08440 | 29 |
| OsSweet7c-Os12g07860 | 30 |
| OsSweet7d-Os09g08490 | 31 |
| OsSweet7e-Os09g08270 | 32 |
| OsSweet11-Os08g42350-Os8N3-Os.10401.1.S1_s_at | 33 |
| Os5weet12-Os03g22590 | 34 |
| Os5weet13-Os12g29220-Os12N3 | 35 |
| OsSweet14-Os11g31190-Os11N3 | 36 |
| OsSweet15-Os02g30910 | 37 |
| Os5weet16-Os03g22200 | 38 |
| Zea mays | |
| ZmSweet1a-GRMZM2G039365-Zm.1488.1.S1_at | 39 |
| ZmSweet1b-GRMZM2G153358 | 40 |
| ZmSweet2-GRMZM2G324903-Zm.12522.1.A1_at | 41 |
| ZmSweet3a-GRMZM2G179679-Zm.8559.1.A1_at | 42 |
| ZmSweet3b-GRMZM2G060974 | 43 |
| ZmSweet4a-GRMZM2G000812-Zm.9995.1.A1_at | 44 |
| ZmSweet4b-GRMZM2G144581-Zm.4672.1.S1_at | 45 |
| ZmSweet4d-GRMZM2G137954-Zm.10819.1.S1_at | 46 |
| ZmSweet6a-GRMZM2G157675-Zm.1886.1.S1_at | 47 |
| ZmSweet6b-GRMZM2G416965 | 48 |
| ZmSweet11-GRMZM2G368827-Zm.12529.1.A1_at | 49 |
| ZmSweet12a-GRMZM2G133322 | 50 |
| ZmSweet12b-GRMZM2G099609 | 51 |
| ZmSweet13a-GRMZM2G173669-Zm.1482.3.A1_at | 52 |
| ZmSweet13b-GRMZM2G021706 | 53 |
| ZmSweet13c-GRMZM2G179349 | 54 |
| ZmSweet14a-GRMZM2G094955 | 55 |
| ZmSweet14b-GRMZM2G015976 | 56 |
| ZmSweet15a-GRMZM2G168365-Zm.13688.1.S1_at | 57 |
| ZmSweet15b-GRMZM5G872392-Zm.13688.1.S1_at | 58 |
| ZmSweet16a-GRMZM2G106462-Zm.9036.1.A1_at | 59 |
| ZmSweet16b-GRMZM2G111926 | 60 |
| ZmSweet17-GRMZM2G107597 | 61 |
| Citrus sinensis | |
| CsSweet1-CIT3027 | 62 |
| CsSweet2a-CIT4657 | 63 |
| CsSWEET2b - orange1.1g024679 | 64 |
| CsSWEET3 - orange1.1g042197 | 65 |
| CsSWEET4a - orange1.1g028709 | 66 |
| CsSWEET4b - orange1.1g043313 | 67 |
| CsSWEET5 - orange1.1g037762 | 68 |
| CsSWEET8a - orange1.1g042988 | 69 |
| CsSWEET8b - orange1.1g044881 | 70 |
| CsSweet9-CIT15918 | 71 |
| CsSWEET10 - orange1.1g047365 | 72 |
| CsSWEET11 - orange1.1g036251 | 73 |
| CsSWEET12 - orange1.1g020 | 74 |
| CsSWEET15 - orange1.1g025761 | 75 |
| CsSWEET16a - orange1.1g021755 | 76 |
| CsSWEET16b - orange1.1g039851 | 77 |
| CsSWEET17 - orange1.1g026722 | 78 |
| Medicago truncatula | |
| MtSWEET2b - AC235677_9 | 79 |
| MtSWEET3c - Medtr1g028460 | 80 |
| MtSWEET1a - Medtr1g029380 | 81 |
| MtSWEET15a - Medtr2g007890 | 82 |
| MtSWEET6 - Medtr3g080990 | 83 |
| MtSWEET1b - Medtr3g089125 | 84 |
| MtSWEET3a - Medtr3g090940 | 85 |
| MtSWEET3b - Medtr3g090950 | 86 |
| MtSWEET13 - Medtr3g098910 | 87 |
| MtSWEET11 - Medtr3g098930 | 88 |
| MtSWEET4 - Medtr4g106990 | 89 |
| MtSWEET15b - Medtr5g067530 | 90 |
| MtSWEET9a - Medtr5g092600 | 91 |
| MtSWEET5a - Medtr6g007610 | 92 |
| MtSWEET5c - Medtr6g007623 | 93 |
| MtSWEET5d - Medtr6g007633 | 94 |
| MtSWEET5b - Medtr6g007637 | 95 |
| MtSWEET2c - Medtr6g034600 | 96 |
| MtSWEET9b - Medtr7g007490 | 97 |
| MtSWEET15d - Medtr7g405710 | 98 |
| MtSWEET15c - Medtr7g405730 | 99 |
| MtSWEET2a - Medtr8g042490 | 100 |
| MtSWEET14 - Medtr8g096310 | 101 |
| MtSWEET12 - Medtr8g096320 | 102 |
| MtSWEET7 - Medtr8g099730 | 103 |
| MtSWEET16-Mtr.42164.1.S1_at | 104 |
| Triticum aestivum | |
| TaSWEET2-GR302815-65965389 | 105 |
| TaSweet13-EV254168 | 106 |
| Glycine max | |
| GmSweet1-XP003526670-GmaAffx.76027.1.S1_at | 107 |
| GmSweet2-XP003540515-GmaAffx.1401.1.S1_at | 108 |
| GmSweet3a-XP003544116 | 109 |
| GmSweet3b-255647679-ACU24301--GmaAffx.32284.1.S1_at | 110 |
| GmSweet9a-356499604-XP003552719 | 111 |
| GmSweet9b-GM18G53250 | 112 |
| GmSweet11a-Glyma06g17530.1 | 113 |
| GmSweet11b-XP003523161 | 114 |
| GmSweet11c-XP003532478-Gma.7424.1.S1_at | 115 |
| GmSweet12a-GlycineMaxcDNA-clone:GMFL01-46-E1- | 116 |
| Gma.1705.1.S1_a_at | |
| GmSweet12b-XP003526939 | 117 |
| GmSweet15a-XP003551863 | 118 |
| GmSweet15b-XP003524088 | 119 |
| Populus trichocarpa | |
| PtSWEET1a - Potri.005G187300 | 120 |
| PtSWEET17a - Potri.013G013800 | 121 |
| PtSWEET16c - Potri.013G014500 | 122 |
| PtSWEET17b - Potri.013G013900 | 123 |
| PtSWEET16b - Potri.013G014400 | 124 |
| PtSWEET15a - Potri.003G166800 | 125 |
| PtSWEET6 - Potri.003G143100 | 126 |
| PtSWEET2c - Potri.011G103600 | 127 |
| PtSWEET3a - Potri.015G021500 | 128 |
| PtSWEET10b - Potri.015G101600.1 | 129 |
| PtSWEET5 - Potri.015G074300 | 130 |
| PtSWEET10c - Potri.015G101500 | 131 |
| PtSWEET11 - Potri.015G101700 | 132 |
| PtSWEET1b - Potri.002G072600 | 133 |
| PtSWEET9 - Potri.019G030500-PtpAffx.221634.1.S1_at | 134 |
| PtSWEET10a - Potri.015G101400-PtpAffx.212900.1.S1_at | 135 |
| PtSWEET16a - Potri.005G023900 | 136 |
| PtSWEET16d - Potri.008G220600 | 137 |
| PtSWEET2d - Potri.001G355500 | 138 |
| PtSWEET2b - Potri.001G383000 | 139 |
| PtSWEET2a - Potri.001G383400 | 140 |
| PtSWEET4 - Potri.001G344300 | 141 |
| PtSWEET15b - Potri.001G060900 | 142 |
| PtSWEET10d - Potri.012G103200 | 143 |
| PtSWEET3b - Potri.012G031400 | 144 |
| Vitis vinifera | |
| VvSweet1-XP002265836 | 145 |
| VvSweet2a-XP002285636 | 146 |
| VvSweet2b-XP002269484 | 147 |
| VvSweet3-XP002267886 | 148 |
| VvSweet10\|225456416 | 149 |
| VvSweet9\|225436789 | 150 |
| Brachypodium distachyon | |
| BdSweet1a-XP003564773 | 151 |
| BdSweet1b-XP003568408 | 152 |
| BdSweet3-XP003568735 | 153 |
| Hordeum vulgare | |
| HvSweet1aBAJ94374 | 154 |
| HvSweet1b-BAK08026 | 155 |
| HvSweet13-BAJ85621 | 156 |
| HvSweet14-BAJ94651 | 157 |
| HvSweet15 - Contig8708_at-AK373077 | 158 |
| Sorghum bicolor | |
| SbSweet1\|Sb09g020860 | 159 |
| SbSweet2\|Sb03g032190 | 160 |
| SbSweet3a\|Sb09g006950 | 161 |
| SbSweet3b\|Sb03g001520 | 162 |
| SbSweet4a\|Sb04g012910 | 163 |
| SbSweet4b\|Sb04g015420 | 164 |
| SbSweet4c\|Sb04g012920 | 165 |
| SbSweet5\|Sb09g030270 | 166 |
| SbSweet6a\|Sb03g027260 | 167 |
| SbSweet8\|Sb03g003470 | 168 |
| SbSweet11a\|Sb07g026040 | 169 |
| SbSweet11b\|Sb02g029430 | 170 |
| SbSweet12\|Sb01g035490 | 171 |
| SbSweet13a\|Sb08g013620 | 172 |
| SbSweet13b\|Sb08g013840 | 173 |
| SbSweet13c\|Sb08g014040 | 174 |
| SbSweet14\|Sb05g018110 | 175 |
| SbSweet15\|Sb04g021000 | 176 |
| SbSweet16a\|Sb03g012930 | 177 |
| SbSweet16b\|Sb01g035840 | 178 |
| Picea sitchensis | |
| PsSweet1-ACN40940 | 179 |
| PsSweet3-ABK26022 | 180 |
| PsSweet2-A0E75802 | 181 |
| PsSweet8-ADE76727 | 182 |
| PsSweet16-ABK26262 | 183 |
| PsSweet17-ADE76959 | 184 |
| Physcomitrella patens | |
| PpSweet1a - Pp1s127_127V6.1 | 185 |
| PpSweet1b - Pp1s54_64V6.1 | 186 |
| PpSweet2a - Pp1s240_24V6.1 | 187 |
| PpSweet2b - Pp1s307_21V6.1 | 188 |
| PpSweet4 - Pp1s39_291V6.1 | 189 |
| PpSweet8 | 190 |
| Amborella trichopoda | |
| AmboSweet1 - scaffold00071.29 | 191 |
| AmboSweet2 - scaffold00007.362 | 192 |
| AmboSweet3a - scaffold00021.254 | 193 |
| AmboSweet3b - scaffold00015.111 | 194 |
| AmboSweet6 - scaffold00058.125 | 195 |
| AmboSweet7 - scaffold00058.151 | 196 |
| AmboSweet11 - scaffold00016.169 | 197 |
| AmboSweet16 - scaffold00045.233 | 198 |
| Aquilegia caerulea | |
| AcSweet1 - Aquca_014_00360 | 199 |
| AcSweet17 - Aquca_017_00148 | 200 |
| AcSweet3b - Aquca_012_00215 | 201 |
| AcSweet13 - Aquca_011_00056 | 202 |
| AcSweet12 - Aquca_021_00060 | 203 |
| AcSweet4 - Aquca_037_00238 | 204 |
| AcSweet6 - Aquca_001_00818 | 205 |
| AcSweet2b - Aquca_468_00002 | 206 |
| AcSweet16 - Aquca_003_00698 | 207 |
| AcSweet11 - Aquca_003_00877 | 208 |
| AcSweet5 - Aquca_002_00199 | 209 |
| AcSweet2c - Aquca_055_00129 | 210 |
| AcSweet2a - Aquca_022_00050 | 211 |
| AcSweet3a - Aquca_013_00133 | 212 |
| AcSweet7 - Aquca_025_00283 | 213 |
| Chlamydomonas reinhardtii | |
| CrSweet4 - Cre07.g340700 | 214 |
| CrSweet1 - Cre06.g271800 | 215 |
| CrSweet2 - Cre06.g27180 | 216 |
| CrSweet3 - Cre06.g275000 | 217 |
| CrSweet5 - Cre10.g421650 | 218 |
| Lotus japonicus | |
| LjSweet3 | 219 |
| Saccharum officinarum | |
| SCCCLB1004H11.g | 220 |
| SCCCRT2002F04.g | 221 |
| SCJFRZ2015H09.g | 222 |
| SCQGST1029B12.g | 223 |
| SCJLRZ1021E01.g | 224 |
| SCSBFL4070E03.g | 225 |
| SCUTST3085E04.g | 226 |
| SCSGRT2065C08.g | 227 |
| SCEQLB1063D10.g | 228 |
| SCEQRT1031C11.g | 229 |
| SCCCLR1072D05.g | 230 |
| SCJLHR1025D07.g | 231 |
| SCEZSD1079C10.g | 232 |
| Musa acuminata | |
| GSMUA_AchrUn_T01040 | 233 |
| GSMUA_Achr11P09020_001 | 234 |
| GSMUA_Achr5P01260_001 | 235 |
| GSMUA_Achr4P09090_001 | 236 |
| GSMUA_Achr8P25010_001 | 237 |
| GSMUA_Achr1P12680_001 | 238 |
| GSMUA_Achr10P22330_001 | 239 |
| GSMUA_Achr1P25290_001 | 240 |
| GSMUA_Achr8P00620_001 | 241 |
| GSMUA_Achr7P14690_001 | 242 |
| GSMUA_Achr6P09180_001 | 243 |
| GSMUA_AchrUn_randomP01040_001 | 244 |
| GSMUA_Achr10P20300_001 | 245 |
| GSMUA_Achr8P09230_001 | 246 |
| GSMUA_Achr3P32170_001 | 247 |
| GSMUA_Achr6P23850_001 | 248 |
| GSMUA_Achr11P05500_001 | 249 |
| GSMUA_Achr10P11880_001 | 250 |
| GSMUA_Achr3P18700_001 | 251 |
| GSMUA_Achr6P07950_001 | 252 |
| GSMUA_Achr8P10260_001 | 253 |
| GSMUA_Achr11P15500_001 | 254 |
| GSMUA_Achr3P08960_001 | 255 |
| GSMUA_Achr3P08120_001 | 256 |
| GSMUA_Achr9P17640_001 | 257 |
| GSMUA_AchrUn_randomP01030_001 | 258 |
| GSMUA_Achr6P09170_001 | 259 |
| Manioth esculenta | |
| MeSWEET1a - cassava4.1_014638m | 260 |
| MeSWEET1b - cassava4.1_014650m | 261 |
| MeSWEEET2a - cassava4.1_015227m | 262 |
| MeSWEET2b - cassava4.1_030719m | 263 |
| MeSWEET3a - cassava4.1_026477m | 264 |
| MeSWEET3b - cassava4.1_022559m | 265 |
| MeSWEET4 - cassava4.1_016815m | 266 |
| MeSWEET5 - cassava4.1_026390m | 267 |
| MeSWEET6 - cassava4.1_014231m | 268 |
| MeSWEET7 - cassava4.1_028141m | 269 |
| MeSWEET8a - cassava4.1_032999m | 270 |
| MeSWEET8b - cassava4.1_012690m | 271 |
| MeSWEET8c - cassava4.1_014587m | 272 |
| MeSWEET9 - cassava4.1_032222m | 273 |
| MeSWEET10a - cassava4.1_013474m | 274 |
| MeSWEET10b - cassava4.1_015602m | 275 |
| MeSWEET10c - cassava4.1_021350m | 276 |
| MeSWEET10d - cassava4.1_013519m | 277 |
| MeSWEET10e - cassava4.1_032927m | 278 |
| MeSWEET11 - cassava4.1_028116m | 279 |
| MeSWEET12a - cassava4.1_017557m | 280 |
| MeSWEET12b - cassava4.1_018003m | 281 |
| MeSWEET13cassava4.1_026944m | 282 |
| MeSWEET15a - cassava4.1_026251m | 283 |
| MeSWEET15b - cassava4.1_014124m | 284 |
| MeSWEET16a - cassava4.1_014996m | 285 |
| MeSWEET16b - cassava4.1_015143m | 286 |
| MeSWEET17 - cassava4.1_014640m | 287 |
| MeSWEET X - cassava4.1_031208m | 288 |
| Cucumis sativus | |
| Csativus\|Cucsa.057980\|Cucsa.057980.1 | 289 |
| Csativus\|Cucsa.057980\|Cucsa.057980.2 | 290 |
| Csativus\|Cucsa.077130\|Cucsa.077130.1 | 291 |
| Csativus\|Cucsa.077130\|Cucsa.077130.2 | 292 |
| Csativus\|Cucsa.091060\|Cucsa.091060.1 | 293 |
| Csativus\|Cucsa.098360\|Cucsa.098360.1 | 294 |
| Csativus\|Cucsa.114740\|Cucsa.114740.1 | 295 |
| Csativus\|Cucsa.114740\|Cucsa.114740.2 | 296 |
| Csativus\|Cucsa.114740\|Cucsa.114740.3 | 297 |
| Csativus\|Cucsa.134790\|Cucsa.134790.1 | 298 |
| Csativus\|Cucsa.134800\|Cucsa.134800.1 | 299 |
| Csativus\|Cucsa.157110\|Cucsa.157110.1 | 300 |
| Csativus\|Cucsa.157120\|Cucsa.157120.1 | 301 |
| Csativus\|Cucsa.181790\|Cucsa.181790.1 | 302 |
| Csativus\|Cucsa.201980\|Cucsa.201980.1 | 303 |
| Csativus\|Cucsa.252960\|Cucsa.252960.1 | 304 |
| Csativus\|Cucsa.277610\|Cucsa.277610.1 | 305 |
| Csativus\|Cucsa.277620\|Cucsa.277620.1 | 306 |
| Csativus\|Cucsa.303950\|Cucsa.303950.1 | 307 |
| Csativus\|Cucsa.339600\|Cucsa.339600.1 | 308 |
| Csativus\|Cucsa.339610\|Cucsa.339610.1 | 309 |
| Csativus\|Cucsa.349380\|Cucsa.349380.1 | 310 |
| Nicotiana attenuata | |
| Na_454_00948 | 311 |
| Na_454_01003 | 312 |
| Na_454_02704 | 313 |
| Na_454_03028 | 314 |
| Na_454_03036 | 315 |
| Na_454_03741 | 316 |
| Na_454_04103 | 317 |
| Na_454_04416 | 318 |
| Na_454_05017 | 319 |
| Na_454_05156 | 320 |
| Na_454_05391 | 321 |
| Na_454_06723 | 322 |
| Na_454_07492 | 323 |
| Na_454_16634 | 324 |
| Na_454_27848 | 325 |
| Na_454_02675 | 326 |
| Na_454_20567 | 327 |
| Phoenix dactylifera | |
| PDK_30s1148281g011 | 328 |
| PDK_30s763631g005 | 329 |
| PDK_30s763631g006 | 330 |
| PDK_30s847911g001 | 331 |
| PDK_30s668711g003 | 332 |
| PDK_30s844111g003 | 333 |
| PDK_30s1125281g002 | 334 |
| PDK_30s818661g002 | 335 |
| PDK_30s922871g007 | 336 |
| PDK_30s724061g001 | 337 |
| PDK_30s791261g004 | 338 |
| PDK_30s672781g004 | 339 |
| PDK_30s1113331g001 | 340 |
| PDK_30s1113331g002 | 341 |
| PDK_30s1113331g003 | 342 |
| PDK_30s664101g001 | 343 |
| PDK_30s759071g001 | 344 |
| PDK_30s767611g001 | 345 |
| PDK_30s669461g001 | 346 |
| PDK_30s733511g001 | 347 |
| Phaseolus vulgaris | |
| Pvulgaris\|Phvul.003G199300\|Phvul.003G199300.1 | 348 |
| Pvulgaris\|Phvul.009G162700\|Phvul.009G162700.1 | 349 |
| Pvulgaris\|Phvul.009G137700\|Phvul.009G137700.1 | 350 |
| Pvulgaris\|Phvul.009G249700\|Phvul.009G249700.1 | 351 |
| Pvulgaris\|Phvul.009G162900\|Phvul.009G162900.1 | 352 |
| Pvulgaris\|Phvul.009G134300\|Phvul.009G134300.1 | 353 |
| Pvulgaris\|Phvul.009G162800\|Phvul.009G162800.1 | 354 |
| Pvulgaris\|Phvul.005G076300\|Phvul.005G076300.2 | 355 |
| Pvulgaris\|Phvul.005G076300\|Phvul.005G076300.1 | 356 |
| Pvulgaris\|Phvul.011G168100\|Phvul.011G168100.1 | 357 |
| Pvulgaris\|Phvul.008G001100\|Phvul.008G001100.1 | 358 |
| Pvulgaris\|Phvul.008G001200\|Phvul.008G001200.1 | 359 |
| PvSWEET9-Pvulgaris\|Phvul.008G007600\|Phvul.008G007600.1 | 360 |
| Pvulgaris\|Phvul.004G017200\|Phvul.004G017200.1 | 361 |
| Pvulgaris\|Phvul.004G017400\|Phvul.004G017400.1 | 362 |
| Pvulgaris\|Phvul.004G017300\|Phvul.004G017300.1 | 363 |
| Pvulgaris\|Phvul.004G017100\|Phvul.004G017100.1 | 364 |
| Pvulgaris\|Phvul.001G061900\|Phvul.001G061900.1 | 365 |
| Pvulgaris\|Phvul.001G064300\|Phvul.001G064300.1 | 366 |
| Pvulgaris\|Phvul.006G210800\|Phvul.006G210800.1 | 367 |
| Pvulgaris\|Phvul.006G000600\|Phvul.006G000600.1 | 368 |
| Pvulgaris\|Phvul.002G283800\|Phvul.002G283800.1 | 369 |
| Pvulgaris\|Phvul.002G283900\|Phvul.002G283900.1 | 370 |
| Pvulgaris\|Phvul.002G283900\|Phvul.002G283900.2 | 371 |
| Pvulgaris\|Phvul.002G300900\|Phvul.002G300900.1 | 372 |
| Pvulgaris\|Phvul.002G203600\|Phvul.002G203600.1 | 373 |
| Ricunus communis | |
| 27985.m000892 | 374 |
| 30169.m006529 | 375 |
| 30128.m008852 | 376 |
| 29726.m004066 | 377 |
| 30068.m002528 | 378 |
| 30147.m014444 | 379 |
| 30147.m014445 | 380 |
| 29579.m000197 | 381 |
| RcSWEET9-29647.m002020 | 382 |
| 29929.m004599 | 383 |
| 29822.m003348 | 384 |
| 30147.m014447 | 385 |
| 30026.m001515 | 386 |
| 30147.m013970 | 387 |
| 29475.m000237 | 388 |
| 30147.m014446 | 389 |
| 29822.m003349 | 390 |
| 27613.m000628 | 391 |
| Prunus persica | |
| Ppersica\|ppa017677m.g\|ppa017677m | 392 |
| Ppersica\|ppa010394m.g\|ppa010394m | 393 |
| Ppersica\|ppa010181m.g\|ppa010181m | 394 |
| Ppersica\|ppa020717m.g\|ppa020717m | 395 |
| Ppersica\|ppa024244m.g\|ppa024244m | 396 |
| Ppersica\|ppa009789m.g\|ppa009789m | 397 |
| Ppersica\|ppa021855m.g\|ppa021855m | 398 |
| Ppersica\|ppa014953m.g\|ppa014953m | 399 |
| Ppersica\|ppa018792m.g\|ppa018792m | 400 |
| Ppersica\|ppa010594m.g\|ppa010594m | 401 |
| Ppersica\|ppa023718m.g\|ppa023718m | 402 |
| Ppersica\|ppa021908m.g\|ppa021908m | 403 |
| Ppersica\|ppa015264m.g\|ppa015264m | 404 |
| Ppersica\|ppa010208m.g\|ppa010208m | 405 |
| Ppersica\|ppa009422m.g\|ppa009422m | 406 |
| Ppersica\|ppa010808m.g\|ppa010808m | 407 |
| Ppersica\|ppa017165m.g\|ppa017165m | 408 |
| Ppersica\|ppa019530m.g\|ppa019530m | 409 |
| Ppersica\|ppa021919m.g\|ppa021919m | 410 |

[0078] In additional embodiments, the peptide variants described herein are functional and capable of transporting at least one sugar when used in the methods, constructs, plants and plant seeds of the present invention. In some embodiments, the SWEET variants of the present invention have an enhanced ability to transport at least one sugar compared to the wild-type SWEET.

[0079] A polypeptide having an amino acid sequence at least, for example, about 95% “identical” to a reference an amino acid sequence, e.g., SEQ ID NO: 1, is understood to mean that the amino acid sequence of the polypeptide is identical to the reference sequence except that the amino acid sequence may include up to about five modifications per each 100 amino acids of the reference amino acid sequence. In other words, to obtain a peptide having an amino acid sequence at least about 95% identical to a reference amino acid sequence, up to about 5% of the amino acid residues of the reference sequence may be deleted or substituted with another amino acid or a number of amino acids up to about 5% of the total amino acids in the reference sequence may be inserted into the reference sequence. These modifications of the reference sequence may occur at the N-terminus or C-terminus positions of the reference amino acid sequence or anywhere between those terminal positions, interspersed either individually among amino acids in the reference sequence or in one or more contiguous groups within the reference sequence.

[0080] As used herein, “identity” is a measure of the identity of nucleotide sequences or amino acid sequences compared to a reference nucleotide or amino acid sequence. In general, the sequences are aligned so that the highest order match is obtained. “Identity” per se has an art-recognized meaning and can be calculated using well known techniques. While there are several methods to measure identity between two polynucleotide or polypeptide sequences, the term “identity” is well known to skilled artisans (Carillo (1988) J. Applied Math. 48, 1073). Examples of computer program methods to determine identity and similarity between two sequences include, but are not limited to, GCG program package (Devereux (1984) Nucleic Acids Research 12, 387), BLASTP, ExPASy, BLASTN, FASTA (Atschul (1990) J. Mol. Biol. 215, 403) and FASTDB. Examples of methods to determine identity and similarity are discussed in Michaels (2011) Current Protocols in Protein Science, Vol. 1, John Wiley & Sons.

[0081] In one embodiment of the present invention, the algorithm used to determine identity between two or more polypeptides is BLASTP. In another embodiment of the present invention, the algorithm used to determine identity between two or more polypeptides is FASTDB, which is based upon the algorithm of Brutlag (1990) Comp. App. Biosci. 6, 237-245). In a FASTDB sequence alignment, the query and reference sequences are amino sequences. The result of sequence alignment is in percent identity. In one embodiment, parameters that may be used in a FASTDB alignment of amino acid sequences to calculate percent identity include, but are not limited to: Matrix=PAM, k-tuple=2, Mismatch Penalty=1, Joining Penalty=20, Randomization Group Length=0, Cutoff Score=1, Gap Penalty=5, Gap Size Penalty 0.05, Window Size=500 or the length of the subject amino sequence, whichever is shorter.

[0082] If the reference sequence is shorter or longer than the query sequence because of N-terminus or C-terminus additions or deletions, but not because of internal additions or deletions, a manual correction can be made, because the FASTDB program does not account for N-terminus and C-terminus truncations or additions of the reference sequence when calculating percent identity. For query sequences truncated at the N- or C-termini, relative to the reference sequence, the percent identity is corrected by calculating the number of residues of the query sequence that are N- and C-terminus to the reference sequence that are not matched/aligned, as a percent of the total bases of the query sequence. The results of the FASTDB sequence alignment determine matching/alignment. The alignment percentage is then subtracted from the percent identity, calculated by the above FASTDB program using the specified parameters, to arrive at a final percent identity score. This corrected score can be used for the purposes of determining how alignments “correspond” to each other, as well as percentage identity. Residues of the reference sequence that extend past the N- or C-termini of the query sequence may be considered for the purposes of manually adjusting the percent identity score. That is, residues that are not matched/aligned with the N- or C-termini of the comparison sequence may be counted when manually adjusting the percent identity score or alignment numbering.

[0083] For example, a 90 amino acid residue query sequence is aligned with a 100 residue reference sequence to determine percent identity. The deletion occurs at the N-terminus of the query sequence and therefore, the FASTDB alignment does not show a match/alignment of the first 10 residues at the N-terminus. The 10 unpaired residues represent 10% of the reference sequence (number of residues at the N- and C-termini not matched/total number of residues in the reference sequence) so 10% is subtracted from the percent identity score calculated by the FASTDB program. If the remaining 90 residues were perfectly matched (100% alignment) the final percent identity would be 90% (100% alignment—10% unmatched overhang). In another example, a 90 residue query sequence is compared with a 100 reference sequence, except that the deletions are internal deletions. In this case the percent identity calculated by FASTDB is not manually corrected, since there are no residues at the N- or C-termini of the subject sequence that are not matched/aligned with the query. In still another example, a 110 amino acid query sequence is aligned with a 100 residue reference sequence to determine percent identity. The addition in the query occurs at the N-terminus of the query sequence and therefore, the FASTDB alignment may not show a match/alignment of the first 10 residues at the N-terminus. If the remaining 100 amino acid residues of the query sequence have 95% identity to the entire length of the reference sequence, the N-terminal addition of the query would be ignored and the percent identity of the query to the reference sequence would be 95%.

[0084] As used herein, the terms “correspond(s) to” and “corresponding to,” as they relate to sequence alignment, are intended to mean enumerated positions within the reference protein, e.g., wild-type SWEET4d, and those positions in the variant or ortholog SWEET4d that align with the positions with the reference protein. Thus, when the amino acid sequence of a subject SWEET is aligned with the amino acid sequence of a reference SWEET, the amino acids in the subject sequence that “correspond to” certain enumerated positions of the reference sequence are those that align with these positions of the reference sequence, e.g., SEQ ID NO: 2, but are not necessarily in these exact numerical positions of the reference sequence. Methods for aligning sequences for determining corresponding amino acids between sequences are described herein.

[0085] Variants resulting from insertion of the polynucleotide encoding a SWEET into an expression vector system are also contemplated. For example, variants (usually insertions) may arise from when the amino terminus and/or the carboxy terminus of a SWEET is/are fused to another polypeptide.

[0086] In another aspect, the invention provides deletion variants wherein one or more amino acid residues in a SWEET are removed. Deletions can be effected at one or both termini of the SWEET, or with removal of one or more non-terminal amino acid residues of the SWEET. Deletion variants, therefore, include all functional fragments of a particular SWEET.

[0087] Within the confines of the disclosed percent identity, the invention also relates to substitution variants of disclosed polypeptides of the invention. Substitution variants include those polypeptides wherein one or more amino acid residues of a SWEET are removed and replaced with alternative residues. In one aspect, the substitutions are conservative in nature; however, the invention embraces substitutions that are also non-conservative. Conservative substitutions for this purpose may be defined as set out in the tables below. Amino acids can be classified according to physical properties and contribution to secondary and tertiary protein structure. A conservative substitution is recognized in the art as a substitution of one amino acid for another amino acid that has similar properties. Exemplary conservative substitutions are set out in below.

TABLE III
Conservative Substitutions

| Side Chain Characteristic | Amino Acid |
|---|---|
| Aliphatic | |
| Non-polar | Gly, Ala, Pro, Iso, Leu, Val |
| Polar-uncharged | Cys, Ser, Thr, Met, Asn, Gln |
| Polar-charged | Asp, Glu, Lys, Arg |
| Aromatic | His, Phe, Trp, Tyr |
| Other | Asn, Gln, Asp, Glu |

[0088] Alternatively, conservative amino acids can be grouped as described in Lehninger (1975) Biochemistry, Second Edition; Worth Publishers, pp. 71-77, as set forth below.

TABLE IV
Conservative Substitutions

| Side Chain Characteristic | Amino Acid |
|---|---|
| Non-polar (hydrophobic) | |
| Aliphatic: | Ala, Leu, Iso, Val, Pro |
| Aromatic: | Phe, Trp |
| Sulfur-containing: | Met |
| Borderline: | Gly |
| Uncharged-polar | |
| Hydroxyl: | Ser, Thr, Tyr |
| Amides: | Asn, Gln |
| Sulfhydryl: | Cys |
| Borderline: | Gly |
| Positively Charged (Basic): | Lys, Arg, His |
| Negatively Charged (Acidic) | Asp, Glu |

[0089] And still other alternative, exemplary conservative substitutions are set out below.

TABLE V
Conservative Substitutions

| Original Residue | Exemplary Substitution |
|---|---|
| Ala (A) | Val, Leu, Ile |
| Arg (R) | Lys, Gln, Asn |
| Asn (N) | Gln, His, Lys, Arg |
| Asp (D) | Glu |
| Cys (C) | Ser |
| Gln (Q) | Asn |
| Glu (E) | Asp |
| His (H) | Asn, Gln, Lys, Arg |
| Ile (I) | Leu, Val, Met, Ala, Phe |
| Leu (L) | Ile, Val, Met, Ala, Phe |
| Lys (K) | Arg, Gln, Asn |
| Met (M) | Leu, Phe, Ile |
| Phe (F) | Leu, Val, Ile, Ala |
| Pro (P) | Gly |
| Ser (S) | Thr |
| Thr (T) | Ser |
| Trp (W) | Tyr |
| Tyr (Y) | Trp, Phe, Thr, Ser |
| Val (V) | Ile, Leu, Met, Phe, Ala |

[0090] It should be understood that the definition of peptides or polypeptides of the invention is intended to include polypeptides bearing modifications other than insertion, deletion, or substitution of amino acid residues. By way of example, the modifications may be covalent in nature, and include for example, chemical bonding with polymers, lipids, other organic and inorganic moieties. Such derivatives may be prepared to improve intracellular processing, the targeting capacity of the polypeptide for desired cells or tissues and the like. Similarly, the invention further embraces SWEETs or variants thereof that have been covalently modified to include one or more water-soluble polymer attachments such as polyethylene glycol, polyoxyethylene glycol or polypropylene glycol.

[0091] The plant cell(s) utilized in methods, constructs, plants and plant seeds of the present invention can be from any part or tissue of a plant including but not limited to the root, stem, leaf, seed, seedcoat, flower, fruit, anther, nectary, ovary, petal, tapetum, xylem, or phloem. If the genetically modified plant cell is comprised within a whole plant, the entire plant need not contain or express the genetic modification.

[0092] As described herein, the genetically modified plants and/or plant cells and/or plant seeds may be a plant or from a plant that is a dicot or monocot or gymnosperm. The plant may be crops, such as a food crops, feed crops or biofuels crops. Exemplary important crops may include corn, wheat, soybean, cotton and rice. Crops also include corn, wheat, barley, triticale, soybean, cotton, millet, sorghum, sugarcane, sugar beet, potato, tomato, grapevine, citrus (orange, lemon, grapefruit, etc), lettuce, alfalfa, common bean, fava bean and strawberries, sunflowers and rapeseed, cassava, miscanthus and switchgrass. Other examples of plants include but are not limited to an African daisy, African violet, alfalfa, almond, anemone, apple, apricot, asparagus, avocado, azalea, banana and plantain, beet, bellflower, black walnut, bleeding heart, butterfly flower, cacao, caneberries, canola, carnation, carrot, cassava, diseases, chickpea, cineraria, citrus, coconut palm, coffee, common bean, maize, cotton, crucifers, cucurbit, cyclamen, dahlia, date palm, douglas-fir, elm, English walnut, flax, Acanthaceae, Agavaceae, Araceae, Araliaceae, Araucariacea, Asclepiadaceae, Bignoniaceae, Bromeliaceae, Cactaceae, Commelinaceae, Euphobiaceae, Gentianaceae, Gesneriaceae, Maranthaceae, Moraceae, Palmae, Piperaceae, Polypodiaceae, Urticaceae, Vitaceae, fuchsia, geranium, grape, hazelnut, hemp, holiday cacti, hop, hydrangea, impatiens, Jerusalem cherry, kalanchoe, lettuce, lentil, lisianthus, mango, mimulus, monkey-flower, mint, mustar, oats, papaya, pea, peach and nectarine, peanut, pear, pearl millet, pecan, pepper, Persian violet, pigeonpea, pineapple, pistachio, pocketbook plant, poinsettia, potato, primula, red clover, rhododendron, rice, rose, rye, safflower, sapphire flower, spinach, strawberry, sugarcane, sunflower, sweetgum, sweet potato, sycamore, tea, tobacco, tomato, verbena, and wild rice.

[0093] The methods, constructs, plants and plant seeds of the present invention relate to increasing levels of sugar in developing seeds. The terms “sugar” is well known in the art and is used to mean a monosaccharide, a disaccharide, a trisaccharide, a tetrasaccharide or polysaccharide. The sugar or sugars measured may or may not be modified, such as being acetylated. Specifically, the sugars that are increased are selected from the groups consisting of sucrose, fructose, glucose, mannose and galactose. The sugars that are increased may or may not be part of more complex compounds, such as trisaccharides, e.g., raffinose, tetrasaccharides, e.g., stachyose or polysaccharides, e.g., amylose, amylopectin. The invention is not limited to the identity of the specific sugars that are increased in the seeds and plants of the present invention. Indeed, the SWEET transporters of the present invention predominantly transport hexoses, such as but not limited to glucose, mannose, fructose and galactose, as well as disaccharides, such as but not limited to sucrose, lactose, maltose, trehalose, cellobiose into the developing seed. Once inside the seed coat or developing seed coat, however, the seed may utilize these increased hexoses and/or disaccharides to then form more complex sugars. These more complex sugars that may be contained (increased) in the seed or developing seed include but are not limited to disaccharides, trisaccharides, e.g., raffinose, tetrasaccharides, e.g., stachyose or polysaccharides, e.g., amylose, amylopectin.

[0094] Thus, an “increase in glucose,” for example, is used herein to mean that the levels of glucose are increased over controls, regardless of whether the glucose is free glucose, i.e., occurs as a monosaccharide, or if the glucose subunit is part of a more complex compound, such as but not limited to disaccharides, trisaccharides, tetrasaccharides, or even polysaccharides. Similarly, an “increase in fructose,” for example, is used herein to mean that the levels of fructose are increased over controls, regardless of whether the fructose is free fructose, i.e., occurs as a monosaccharide, or if the fructose subunit is part of a more complex compound, such as but not limited to disaccharides, trisaccharides, tetrasaccharides, or even polysaccharides. Similarly, an “increase in sucrose,” for example, is used herein to mean that the levels of sucrose are increased over controls, regardless of whether the sucrose is free sucrose, i.e., occurs as a disaccharide, or if the fructose is part of a more complex compound, such as but not limited to trisaccharides, tetrasaccharides, or even polysaccharides. Given that the building blocks of di-, tri-, tetra- and polysaccharides are well known, and that methods are well established for analyzing sugar content in seeds, e.g., Hirst, E. L., et al., Biochem. J., 95:453-458 (1965), Steadman, K., et al., Ann. Botany, 77:667-674 (1996), Buckeridge, M. S., Plant Physiol., 154(3):1017-1023 (2010), all of which are incorporated by reference, one of skill in the art can readily ascertain if there is an increase in the level of sugar in a seed or developing seed compared to control seeds or control developing seeds. In select embodiments, methods of assessing or measuring levels of sugar and/or starch content in seeds include but are not limited to HPLC, NMR and mass spectroscopy.

[0095] As used herein, the phase “increase in the levels at least one sugar,” or “increase at least one sugar,” or some derivation thereof, means an increase in the levels of at least one specific, measured sugar in the seed or developing seed, as compared to control seed or control developing seed, even if levels of another sugar in the seed or developing seed may decrease or remain static. Of course, more than one specific, measured sugar may be increased as compared to control seed or control developing seed. In specific embodiments, the phrase “increase in the levels of at least one sugar” means an increase in at least one of at least, glucose, mannose, fructose, galactose, sucrose, lactose, maltose, trehalose or cellobiose into the seed or developing seed. In other specific embodiments, the phrase “increase in the levels of at least one sugar” means an increase in at least two of, glucose, mannose, fructose, galactose, sucrose, lactose, maltose, trehalose or cellobiose into the seed or developing seed. In other specific embodiments, the phrase “increase in the levels of at least one sugar” means an increase in at least three of, glucose, mannose, fructose, galactose, sucrose, lactose, maltose, trehalose or cellobiose into the seed or developing seed. In other specific embodiments, the phrase “increase in the levels of at least one sugar” means an increase in at least four of, glucose, mannose, fructose, galactose, sucrose, lactose, maltose, trehalose or cellobiose into the seed or developing seed. In other specific embodiments, the phrase “increase in the levels of at least one sugar” means an increase in at least five of, glucose, mannose, fructose, galactose, sucrose, lactose, maltose, trehalose or cellobiose into the seed or developing seed. In other specific embodiments, the phrase “increase in the levels of at least one sugar” means an increase in at least six of, glucose, mannose, fructose, galactose, sucrose, lactose, maltose, trehalose or cellobiose into the seed or developing seed. In other specific embodiments, the phrase “increase in the levels of at least one sugar” means an increase in at least seven of, glucose, mannose, fructose, galactose, sucrose, lactose, maltose, trehalose or cellobiose into the seed or developing seed. In other specific embodiments, the phrase “increase in the levels of at least one sugar” means an increase in at least eight of, glucose, mannose, fructose, galactose, sucrose, lactose, maltose, trehalose or cellobiose into the seed or developing seed. In other specific embodiments, the phrase “increase in the levels of at least one sugar” means an increase in glucose, mannose, fructose, galactose, sucrose, lactose, maltose, trehalose and cellobiose into the seed or developing seed.

[0096] As used herein, the term “seed” is used as it is in the art, i.e., an embryonic plant contained in a seed coat and is generated after fertilization and at least some growth within the maternal plant. A “developing seed” is an embryonic plant that has not completed its growth within the maternal plant, or it can be an embryonic plant around which the seed coat has not completely formed. For the purposes of measuring sugars in seeds or developing seeds as that relates to the present invention described herein, the seeds or developing seeds may or may not be contained within the maternal plant. For example, the seeds may be contained within or on a fruit of the plant, and the fruit may or may not be free of the maternal plant at harvest. The location and methods of isolating the seeds or developing seeds is irrelevant for the purposes of the present invention.

[0097] The methods, constructs, plants and plant seeds of the present invention relate to inserting an exogenous nucleic acid into a plant cell, wherein the nucleic acid codes for at least one SWEET transporter protein described herein. As used herein, the phrase “exogenous nucleic acid” is used to mean a nucleic acid that normally does not exist or occur in the genome of the plant cell. For example, at least one extra copy of nucleic acid encoding a wild-type SWEET transporter is an exogenous nucleic acid. Of course copies of nucleic acids encoding mutant SWEET transporters would also be considered an exogenous nucleic acid.

[0098] In one embodiment, the exogenous nucleic acid that codes for at least one SWEET transporter protein is derived from the same species (which includes being from the same or different subspecies within the same species) in which the exogenous nucleic acid is to be inserted. For example, a nucleic acid coding for the at least one SWEET transporter protein is a nucleic acid encoding the Zea mays SWEET transporter protein and the exogenous nucleic acid is being inserted into Zea mays plant cells. In another embodiment, the exogenous nucleic acid that codes for at least one SWEET transporter protein is derived from a different species in which the exogenous nucleic acid is to be inserted. For example, a nucleic acid coding for the at least one SWEET transporter protein is a nucleic acid encoding the Arabidopsis thaliana SWEET transporter protein and the exogenous nucleic acid is being inserted into Zea mays plant cells. In yet another embodiment, the exogenous nucleic acid that codes for at least one SWEET transporter protein is derived from a different genus in which the exogenous nucleic acid is to be inserted. For example, a nucleic acid coding for the at least one SWEET transporter protein is a nucleic acid encoding the Zea perennis SWEET transporter protein and the exogenous nucleic acid is being inserted into Zea mays plant cells.

[0099] Methods for the introduction or insertion of nucleic acid molecules into plants and plant cells are well-known in the art. For example, plant transformation may be carried out using Agrobacterium-mediated gene transfer, microinjection, electroporation or biolistic methods as it is, e.g., described in Potrykus and Spangenberg (Eds.), Gene Transfer to Plants. Springer Verlag, Berlin, N.Y., 1995. Therein, and in numerous other references available to one of skill in the art, useful plant transformation vectors, selection methods for transformed cells and tissue as well as regeneration techniques are described and can be applied to the methods of the present invention.

[0100] By inserting the exogenous nucleic acid into a plant cell, a transgenic plant is thus created. The methods generally involve inserting an exogenous nucleic acid into a plant cell. The insertion may be transient such that the inserted nucleic acid is not necessarily inherited to subsequence generations. In the alternative, the insertion may be stable or integrated such that the inserted nucleic acid is inherited to subsequence generations. Moreover, the plant cell into which the nucleic acids are inserted may be in culture or it may be part of a whole plant. For example transfection of nucleic acids into plant cells, as understood herein, includes introducing nucleic acids into plant protoplasts and allowing the protoplasts to develop into a callus, which is then allowed to grow into a mature plant. As used herein, the phrase “growing the transgenic plant cell into a mature plant” is used to mean using culture or non-culture growing conditions that allow the transfected plant cell(s) to develop into a whole plant which will contain the at least one copy of the nucleic acid encoding at least one SWEET transporter protein. In other embodiments, “growing the transgenic plant cell into a mature plant” includes introducing the nucleic acid into a portion of a plant, such as a leaf, embryo or portion thereof, and subsequently regenerating a whole plant (T₀ generation) from the leaf, embryo or portion thereof. The T₀ generation plants can subsequently be mated or crossed with other plants to produce T₁, T₂, T₃, etc generations of plants. These other “mating plants” crossed with the T₀ generation plants that are used to produce subsequent generations of transgenic plants (transgenic for the SWEET transporters described herein) may or may not be wild-type plants. In another embodiment, the mating plants crossed with the T₀ generation plants that are used to produce subsequent generations of transgenic plants may or may not be transgenic plants themselves, including but not limited to another T₀ generation plant that is transgenic for at least one SWEET transporter disclosed herein). Of course, if the mating plants used to grow the transgenic plant cells into mature transgenic plants are themselves transgenic, the mating plants can be transgenic for the or different protein or nucleic acid. This subsequent crossing or mating of the T₀ generation plants into subsequent generations, e.g., T₁, T₂, T₃, etc., is included and contemplated when the phrase “growing transgenic plant cells into a mature transgenic plant” is used herein.

[0101] Once the transgenic plant cells are created, the transgenic plant cell(s) may then grow into a transgenic seed-bearing plant using methods disclosed herein and well-established in the art. The seeds produced by the transgenic seed-bearing plants then are capable of producing seeds that have increased sugar content as compared to non-transgenic plants of the same species. As used herein, a “non-transgenic plant” indicates that the plant does not have the same exogenous nucleic acid (as determined by sequence identity) encoding the SWEET protein as the transgenic plants provided herein. Thus, a non-transgenic plant, as used herein, can be a wild-type plant or it may be transgenic for a different nucleic acid, protein, mutation, etc.

[0102] As used herein, the phrase “increased levels of sugar” or “the levels are increased” is used to mean that at least one specific sugar, as defined herein, is increased when compared to control levels.

[0103] Once levels of at least one sugar are measured or assessed, either directly or indirectly, these measured levels can then be compared to control levels of the least one sugar. Control levels of sugar(s) are levels that are deemed to be levels of sugars in seeds from a non-transgenic plant (as defined herein) from the same species as the transgenic plant and grown in similar, if not the same, conditions. To establish the measured sugar levels of a non-transgenic (“normal”) plant, an individual non-transgenic plant or group of non-transgenic plants may be analyzed to determine levels of the specific sugar in the seeds that the plant or plants typically produce. The methods, constructs, compositions, plants and plant seeds of the present invention do not necessarily require that one skilled in the art actually perform the analysis to determine control levels of the at least one sugar in plants, as such data may be readily accessible in the literature or such data may be provided.

[0104] Of course, measurements of normal measured sugar levels can fall within a range of values, and values that do not fall within this “normal range” are said to be outside the normal range. These measurements may or may not be converted to a value, number, factor or score as compared to measurements in the “normal range.” For example, a specific measured value that is above the normal range may be assigned a value or +1, +2, +3, etc., depending on the scoring system devised. The comparison of the measured sugar levels to control levels is to determine if the plant seeds have elevated levels of sugar over control levels of the same sugar in the non-transgenic plants grown in the similar, if not the same, conditions.

[0105] The levels of sugar in both control and transgenic seeds can be assessed in a seed or developing seed. In one embodiment, the levels of sugar are measured in seeds or developing seeds from transgenic and non-transgenic plants when the seeds or developing seeds are at roughly the same stage of development. For example, in one embodiment, the levels of sugar are measured in seeds or developing seeds from transgenic and non-transgenic plants at the zygote stage of seed development, the pre-globular stage of seed development, the globular stage of seed development, the transition stage of seed development, the heart stage of seed development, the torpedo stage of seed development, the linear cotyledon stage of seed development, the bending cotyledon stage of seed development, or the maturation green stage of seed development. In another embodiment, the levels of sugar are measured in seeds or developing seeds from transgenic and non-transgenic plants in at least two stages selected from the zygote stage of seed development, the pre-globular stage of seed development, the globular stage of seed development, the transition stage of seed development, the heart stage of seed development, the torpedo stage of seed development, the linear cotyledon stage of seed development, the bending cotyledon stage of seed development, or the maturation green stage of seed development. In another embodiment, the levels of sugar are measured in seeds or developing seeds from transgenic and non-transgenic plants in at least three stages selected from the zygote stage of seed development, the pre-globular stage of seed development, the globular stage of seed development, the transition stage of seed development, the heart stage of seed development, the torpedo stage of seed development, the linear cotyledon stage of seed development, the bending cotyledon stage of seed development, or the maturation green stage of seed development. In another embodiment, the levels of sugar are measured in seeds or developing seeds from transgenic and non-transgenic plants in at least four stages selected from the zygote stage of seed development, the pre-globular stage of seed development, the globular stage of seed development, the transition stage of seed development, the heart stage of seed development, the torpedo stage of seed development, the linear cotyledon stage of seed development, the bending cotyledon stage of seed development, or the maturation green stage of seed development. In another embodiment, the levels of sugar are measured in seeds or developing seeds from transgenic and non-transgenic plants in at least five stages selected from the zygote stage of seed development, the pre-globular stage of seed development, the globular stage of seed development, the transition stage of seed development, the heart stage of seed development, the torpedo stage of seed development, the linear cotyledon stage of seed development, the bending cotyledon stage of seed development, or the maturation green stage of seed development. In another embodiment, the levels of sugar are measured in seeds or developing seeds from transgenic and non-transgenic plants in at least six stages selected from the zygote stage of seed development, the pre-globular stage of seed development, the globular stage of seed development, the transition stage of seed development, the heart stage of seed development, the torpedo stage of seed development, the linear cotyledon stage of seed development, the bending cotyledon stage of seed development, or the maturation green stage of seed development. In another embodiment, the levels of sugar are measured in seeds or developing seeds from transgenic and non-transgenic plants in at least seven stages selected from the zygote stage of seed development, the pre-globular stage of seed development, the globular stage of seed development, the transition stage of seed development, the heart stage of seed development, the torpedo stage of seed development, the linear cotyledon stage of seed development, the bending cotyledon stage of seed development, or the maturation green stage of seed development. In another embodiment, the levels of sugar are measured in seeds or developing seeds from transgenic and non-transgenic plants in at least eight stages selected from the zygote stage of seed development, the pre-globular stage of seed development, the globular stage of seed development, the transition stage of seed development, the heart stage of seed development, the torpedo stage of seed development, the linear cotyledon stage of seed development, the bending cotyledon stage of seed development, or the maturation green stage of seed development. In another embodiment, the levels of sugar are measured in seeds or developing seeds from transgenic and non-transgenic plants at the zygote stage of seed development, the pre-globular stage of seed development, the globular stage of seed development, the transition stage of seed development, the heart stage of seed development, the torpedo stage of seed development, the linear cotyledon stage of seed development, the bending cotyledon stage of seed development, or the maturation green stage of seed development. As understood herein, levels of sugar in seeds from transgenic plants are considered as “increased” over levels of sugar in seeds from non-transgenic plants if levels are higher in at least one of these stages of seed development.

[0106] As used herein, subject a transgenic plant cell or a transgenic plant to conditions that promote expression of the at least one SWEET transporter is understood to mean that the plant or plant cells are grown under conditions to allow expression of the exogenous nucleic acid. In many instances, such methods of subjecting a plant or plant cell to conditions to allow expression of the at least one SWEET transporter protein include normal growth (greenhouse, field, etc.) conditions. Such circumstances would include instances where the promoter used to drive expression of the nucleic acid encoding the SWEET transporter protein is not an inducible promoter, e.g., a constitutive or tissue specific promoter. In other embodiments, methods of subjecting a plant or plant cell to conditions to allow expression of the at least one SWEET transporter protein include providing a stimulus to the transgenic plant or plant cells to induce expression of the promoter that is operably linked to the nucleic acid encoding the at least one SWEET transporter protein. One of skill in the art will be able to readily recognize the conditions or stimuli that are necessary to induce a chosen inducible promoter to drive expression of a nucleic acid.

[0107] The nucleic acid encoding at least one SWEET transporter may be isolated. As used herein, the term isolated refers to molecules separated from other cell/tissue constituents (e.g. DNA or RNA) that are present in the natural source of the macromolecule. The term isolated may also refer to a nucleic acid or peptide that is substantially free of cellular material, viral material, and culture medium when produced by recombinant DNA techniques, or that is substantially free of chemical precursors or other chemicals when chemically synthesized. Moreover, an isolated nucleic acid may include nucleic acid fragments which are not naturally occurring as fragments and would not be found in the natural state.

[0108] The nucleic acids to be inserted into the plant cells may be part of an expression vector. An expression vector is one into which a desired nucleic acid sequence may be inserted by restriction and ligation such that it is operably joined or operably linked to regulatory sequences and may be expressed as an RNA transcript. Expression refers to the transcription and/or translation of an endogenous gene, transgene or coding region in a cell.

[0109] A coding sequence and regulatory sequences are operably joined when they are covalently linked in such a way as to place the expression or transcription of the coding sequence under the influence or control of the regulatory sequences. If it is desired that the coding sequences be translated into a functional protein, two DNA sequences are said to be operably joined if induction of a promoter in the 5′ regulatory sequences results in the transcription of the coding sequence and if the nature of the linkage between the two DNA sequences does not (1) result in the introduction of a frame-shift mutation, (2) interfere with the ability of the promoter region to direct the transcription of the coding sequences, or (3) interfere with the ability of the corresponding RNA transcript to be translated into a protein. Thus, a promoter region would be operably joined to a coding sequence if the promoter region were capable of affecting transcription of that DNA sequence such that the resulting transcript might be translated into the desired protein or polypeptide.

[0110] Vectors may further contain one or more promoter sequences. A promoter may include an untranslated nucleic acid sequence usually located upstream of the coding region that contains the site for initiating transcription of the nucleic acid. The promoter region may also include other elements that act as regulators of gene expression. In further embodiments of the invention, the expression vector contains an additional region to aid in selection of cells that have the expression vector incorporated. The promoter sequence is often bounded (inclusively) at its 3′ terminus by the transcription initiation site and extends upstream (5′ direction) to include the minimum number of bases or elements necessary to initiate transcription at levels detectable above background. Within the promoter sequence will be found a transcription initiation site, as well as protein binding domains responsible for the binding of RNA polymerase. Eukaryotic promoters will often, but not always, contain “TATA” boxes and “CAT” boxes. A promoter also optionally includes distal enhancer or repressor elements, which can be located as much as several thousand base pairs from the start site of transcription.

[0111] Activation of promoters may be specific to certain cells or tissues, for example by transcription factors only expressed in certain tissues, or the promoter may be ubiquitous and capable of expression in most cells or tissues.

[0112] A constitutive promoter is a promoter that is active under most environmental and developmental conditions. An inducible promoter is a promoter that is active under certain or specific environmental or developmental regulation. Any inducible promoter can be used, see, e.g., Ward et al. Plant Mol. Biol. 22:361-366, 1993. Exemplary inducible promoters include, but are not limited to, that from the ACEI system (responsive to copper) (Meft et al. Proc. Natl. Acad. Sci. USA 90:4567-4571, 1993, In2 gene from maize (responsive to benzenesulfonamide herbicide safeners) (Hershey et al. Mol. Gen. Genetics 227:229-237, 1991, and Gatz et al. Mol. Gen. Genetics 243:32-38, 1994) or Tet repressor from Tn10 (Gatz et al. Mol. Gen. Genetics 227:229-237, 1991). The inducible promoter may respond to an agent foreign to the host cell, see, e.g., Schena et al. PNAS 88: 10421-10425, 1991. Other promoters include but are not limited to waxy 1 (“wx1”) promoter active in starchy endosperm tissue, the BETL1 promoter, Esr6a and 6b promoters and the Miniature1 (Mn1) promoter.

[0113] The inserted exogenous nucleic acid encoding at least one SWEET transporter may be expressed in any location in the cell, including the cytoplasm, cell surface or subcellular organelles such as the nucleus, vesicles, ER, vacuole, etc. Methods and vector components for targeting the expression of proteins to different cellular compartments are well known in the art, with the choice dependent on the particular cell or organism in which the transporter is expressed. See, for instance, Okumoto et al. PNAS 102: 8740-8745, 2005, Fehr et al. J. Fluoresc. 14: 603-609, 2005. Transport of protein to a subcellular compartment such as the chloroplast, vacuole, peroxisome, glyoxysome, cell wall or mitochondrion or for secretion into the apoplast, may be accomplished by means of operably linking a nucleotide sequence encoding a signal sequence to the 5′ and/or 3′ region of a gene encoding the transporter. Targeting sequences at the 5′ and/or 3′ end of the structural gene may determine during protein synthesis and processing where the encoded protein is ultimately compartmentalized.

[0114] The presence of a signal sequence directs a polypeptide to either an intracellular organelle or subcellular compartment or for secretion to the apoplasm. The term targeting signal sequence refers to amino acid sequences, the presence of which in or appended to an expressed protein targets it to a specific subcellular localization. For example, corresponding targeting signals may lead to the secretion of the expressed SWEET transporter, e.g. from a bacterial host in order to simplify its purification. In one embodiment, targeting of the transporter may be used to affect the concentration of at least one sugar in a specific subcellular or extracellular compartment. Appropriate targeting signal sequences useful for different groups of organisms are known to the person skilled in the art and may be retrieved from the literature or sequence data bases.

[0115] If targeting to the plastids of plant cells is desired, a targeting signal peptide can be used. An example of a targeting signal peptide includes but is not limited to amino acid residues 1 to 124 of Arabidopsis thaliana plastidial RNA polymerase (AtRpoT 3) (Plant Journal 17: 557-561, 1999), the targeting signal peptide of the plastidic Ferredoxin:NADP+ oxidoreductase (FNR) of spinach (Jansen et al. Current Genetics 13: 517-522, 1988), the amino acid sequence encoded by the nucleotides −171 to 165 of the cDNA sequence disclosed therein, the transit peptide of the waxy protein of maize including or without the first 34 amino acid residues of the mature waxy protein (Klosgen et al. Mol. Gen. Genet. 217: 155-161, 1989), the signal peptides of the ribulose bisphosphate carboxylase small subunit (Wolter et al. PNAS 85: 846-850, 1988; Nawrath et al. PNAS 91: 12760-12764, 1994), the signal peptide of the NADP malat dehydrogenase (Gallardo et al. Planta 197: 324-332, 1995), the signal peptide of the glutathione reductase (Creissen et al. Plant J. 8: 167-175, 1995) or the signal peptide of the R1 protein (Lorberth et al. Nature Biotechnology 16: 473-477, 1998).

[0116] Targeting to the mitochondria of plant cells may be accomplished by using targeting signal peptides such as but not limited to amino acid residues 1 to 131 of Arabidopsis thaliana mitochondrial RNA polymerase (AtRpoT 1) (Plant Journal 17: 557-561, 1999) or the transit peptide described by Braun (EMBO J. 11: 3219-3227, 1992).

[0117] Targeting to the vacuole in plant cells may be achieved by using targeting signal peptides such as but not limited to the N-terminal sequence (146 amino acids) of the patatin protein (Sonnewald et al. Plant J. 1: 95-106, 1991), the signal sequences described by Matsuoka and Neuhaus (Journal of Exp. Botany 50: 165-174, 1999), Chrispeels and Raikhel (Cell 68: 613-616, 1992), Matsuoka and Nakamura (PNAS 88: 834-838, 1991), Bednarek and Raikhel (Plant Cell 3: 1195-1206, 1991) and/or Nakamura and Matsuoka (Plant Phys. 101: 1-5, 1993).

[0118] Targeting to the ER in plant cells may be achieved by using, e.g., the ER targeting peptide HKTMLPLPLIPSLLLSLSSAEF in conjunction with the C-terminal extension HDEL (Haselhoff, PNAS 94: 2122-2127, 1997). Targeting to the nucleus of plant cells may be achieved by using, e.g., the nuclear localization signal (NLS) of the tobacco C2 polypeptide QPSLKRMKIQPSSQP (SEQ ID NO: 411).

[0119] Targeting to the extracellular space may be achieved by using a transit peptide such as but not limited to the signal sequence of the proteinase inhibitor II-gene (Keil et al. Nucleic Acid Res. 14: 5641-5650, 1986, von Schaewen et al. EMBO J. 9: 30-33, 1990), of the levansucrase gene from Erwinia amylovora (Geier and Geider, Phys. Mol. Plant Pathol. 42: 387-404, 1993), of a fragment of the patatin gene B33 from Solanum tuberosum, which encodes the first 33 amino acids (Rosahl et al. Mol Gen. Genet. 203: 214-220, 1986) or of the one described by Oshima et al. (Nucleic Acids Res. 18: 181, 1990).

[0120] Additional targeting to the plasma membrane of plant cells may be achieved by fusion to a different transporter, preferentially to the sucrose transporter SUT1 (Riesmeier, EMBO J. 11: 4705-4713, 1992). Targeting to different intracellular membranes may be achieved by fusion to membrane proteins present in the specific compartments such as vacuolar water channels (γTIP) (Karlsson, Plant J. 21: 83-90, 2000), MCF proteins in mitochondria (Kuan, Crit. Rev. Biochem. Mol. Biol. 28: 209-233, 1993), triosephosphate translocator in inner envelopes of plastids (Flugge, EMBO J. 8: 39-46, 1989) and photosystems in thylacoids.

[0121] Targeting to the Golgi apparatus can be accomplished using the C-terminal recognition sequence K(X)KXX where “X” is any amino acid (Garabet, Methods Enzymol. 332: 77-87, 2001. Targeting to the peroxisomes can be done using the peroxisomal targeting sequence PTS I or PTS II (Garabet, Methods Enzymol. 332: 77-87, 2001).

[0122] SWEETs Involvement in Seed Filling

[0123] Although no SWEET involvement has been found in embryos, overexpression of other sugar transporters, such as the tonoplast monosaccharide transporter (TMT1), under the control of a constitutive cauliflower mosaic virus 35S promoter, has been shown to increase biomass of Arabidopsis seeds. See Wingenter, K., et al., Plant Physiol., 154(2): 665-677 (October 2010), which is incorporated by reference. In particular, Wingenter et al. showed that increasing expression of the TMT1 transporter increased lipid and protein content in Arabidopsis seeds. Specifically, Arabidopsis overexpressing TMT1 grew faster than wild-type plants on soil and in high-glucose (Glc)-containing liquid medium. Soil-grown TMT1 overexpressor mutants produced larger seeds and greater total seed yield, which was associated with increased lipid and protein content. These changes in seed properties were correlated with slightly decreased nocturnal CO₂ release and increased sugar export rates from detached source leaves. Thus, increased TMT activity in Arabidopsis induced modified subcellular sugar compartimentation, altered cellular sugar sensing, affected assimilate allocation, increased the biomass of Arabidopsis seeds, and accelerated early plant development.

[0124] In other contexts, Rossi, G., et al., Microbial Cell Factories, 9:15 (March 2010) (doi:10.1186/1475-2859-9-15) also reports that yeast cells engineered to overexpress the hexose transporter HXT1 or HXT7, lead to increased in glucose uptake in the cells. In still other contexts, Wang et al. (2008) reports that the rice GIF1 (Grain Incomplete Filling 1) gene encoding a cell-wall invertase is required for carbon partitioning during early grain-filling. Ectopic expression of the cultivated GIF1 gene with the 35S or rice Waxy promoter resulted in smaller grains, whereas overexpression of GIF1, driven by its native promoter, increased grain production. These findings, together with the domestication signature, which were identified by comparing nucleotide diversity of the GIF1 loci between cultivated and wild rice, strongly suggest that GIF1 is a potential domestication gene and that such a domestication-selected gene can be used for further crop improvement.

[0125] Analysis of cell-specific expression in developing seeds is consistent with a role of several SWEETs in sugar import into developing seeds. Analysis of public databases and prior publications indicates that Arabidopsis SWEET1, 4, 5, 7 and 8 (Clade I and II hexose transporters), are expressed in seeds during seed maturation: SWEET1 and 7 in seed coat, SWEET8 in endosperm, and SWEETS in embryo. See Chen, L. Q., et al., Nature, 468:527-532 (2010), which is incorporated by reference. Moreover, SWEET10, 11, 12 and 15 (Clade III sucrose transporters) are expressed in seeds during maturation, specifically SWEET11, 12 and 15 in seed coat, SWEET10 in the chalazal seed coat, and SWEET11 and 15 in the endosperm. See Chen, L. Q., et al., Science, 335:207-211 (January 2012).

[0126] Analysis provided herein confirms that GFP-fusions of SWEET11, 12 and 15 are expressed in seed coat (FIG. 5A). Moreover, a triple sweet11, sweet12, sweet15 mutant shows retarded development and reduced starch content (FIG. 5B, C). Members of the SUT/SUCs proton sucrose cotransporter family are also expressed in the seed coat. Specifically, SUC2, 3, 4, and 5 are expressed during seed maturation, with SUC2 specifically during the ‘maturation green stage’, and SUCS during the linear cotyledon stage.

[0127] Consistent with these preliminary data that implicate SWEETs in seed filling in Arabidopsis, 12 out of the 22 SWEETs are highly expressed in maize kernels (See Maize eFP at bar.utoronto.ca/efp_maize/cgi-bin/efpWeb.cgi and QTELLER at qteller.com). Four Clade I/II hexose transporter SWEETs are highly expressed in seeds. Specifically, SWEET4b and SWEET4d are found both in embryo and endosperm, and SWEET4a and SWEET2 are expressed throughout the seed. Moreover, 8 sucrose transporting Clade III SWEETs are also expressed during seed maturation. Specifically, SWEET11, SWEET13b, SWEET13c and SWEET15b are expressed throughout the seed, SWEET14a, SWEET14b, SWEET15a and SWEET15b are expressed primarily in endosperm. Particularly, the three hexose transporters 4a,b and d (FIG. 7) in the BETL likely play crucial roles in endosperm filling. Similarly, an insertion in ZmSWEET4d obtained from UniformMu resources shows striking EMP (empty pericarp) kernel phenotype (FIGS. 8 A,B).

[0128] In the W22 background, caryopses collapse, endosperm is greatly reduced and embryo size appears smaller. This smaller phenotype is reminiscent of the documented mnl phenotype. In view of the high expression of ZmSWEET4d in BETL, the likely cause for this smaller phenotype is a block in sugar uptake into BETL affecting downstream kernel filling. The current model implicates a minimal number of transport steps, however, multiple SWEET and SUT paralogs in both Arabidopsis and maize seeds were identified, indicating greater complexity in seed filling, with the possibility of additional transport steps.

[0129] Automating the extraction, curation and reduction of spectroscopic data has greatly accelerated analysis of ¹³C-labeling data. The use of a single ¹³C-labeled sample analysis of endosperm tissue from single kernels can discriminate among four individual sibling plants from the same generation of a non-transgenic maize line. The plants and cultured kernels were grown together and the seed weights and compositions (starch, protein, oil, or cell wall contents and major soluble metabolite levels) were not significantly different among seeds from each plant. The small metabolic flux differences revealed by ¹³C-labeling patterns are due to segregation of the non-transgenic genetic background. Differences in flux profiles among 4 transgenic lines with the same growth and composition have been noted. In silico simulations using steady state flux maps are also able to predict the labeling patterns accompanying modest changes in core metabolism. A 10% change in TCA cycle flux results in ˜1% change in total carbon allocation and is associated with a distinct labeling phenotype, which can be discriminated from wild-type and other altered metabolic flux patterns, each of which yields its own label signatures or fingerprints.

[0130] SWEETs Involvement in Nectar Production

[0131] Plants have evolved anatomical and physiological features to attract animals to promote pollination. Reproductive isolation as one mechanism for speciation, is thought to be enhanced in animal pollinated species relative to wind transfer of pollen. Floral traits, including animal pollination, floral nectar spurs, bilateral symmetry and dioecious sexual system, can alter subsequent species abundance within clades. When Gaston de Saporta, Joseph Hooker, Oswald Heer and Charles Darwin discussed the ‘abominable mystery’—the apparent rapid radiation of angiosperms and insects in the mid-Cretaceous—de Saporta suggested that the development and refinement of insect-assisted pollination through the coevolution of pollinators and flowering plants may have been key to pollinator and angiosperm diversification. However the molecular mechanism of nectar secretion has remained elusive.

[0132] Flowering plants have evolved intricate methods to secure efficient interaction with pollinators and, thereby, both successful reproduction and genetic diversity through cross-pollination. Central to this process is the nectar, which contains high amounts of sugars and volatile compounds that attract and reward pollinators as well as toxins that repel unwanted floral visitors and compel pollinators to optimize outcrossing rates. Nectar composition varies widely quantitatively and qualitatively between species, presumably because it is produced to reward different families of animals. Depending on the species, 8 to 80% (w/w) of nectar is comprised of sugars, the most prevalent of which are sucrose, glucose and fructose. Nectar differs in composition from phloem sap, which delivers sugars to nectaries and is dominated by the di- and tri-saccharides sucrose and raffinose. Angiosperm nectar is synthesized and secreted by specialized organs called nectaries. Plants invest significant amounts of energy into the formation of flowers, the production of nectaries, and the secretion of sugary nectar. For example, Nicotiana attenuata, a self-compatible, hawkmoth- and hummingbird-pollinated Asterid, produces nectar that contains sucrose, hexoses and numerous secondary metabolites including nicotine. Brassica rapa, comprising self-compatible and incompatible varieties, produces hexose-dominant sugar. Arabidopsis thaliana, a self-compatible, self-fertilizer, also develops functional nectaries that produce volatiles and secrete hexose-rich nectar. It remains unclear whether nectar production in self-fertilizing plants represents an evolutionary remnant or may function to secure the low rate of outcrossing. Thus, understanding the phylogeny and biochemistry of nectar secretion may help to elucidate the processes underlying diversification of angiosperms.

[0133] Despite the importance of nectar, its secretion process has remained a matter of debate, with few functional data on the transport mechanism. To identify a transporter responsible for nectar secretion, databases of candidate sugar transporters were searched for those transporters specifically expressed in nectaries with characteristics compatible with cellular sugar efflux. Members of the recently identified SWEET sugar transporter family appeared as prime candidates for a role in nectar secretion. SWEET11 and 12 sucrose transporters are known to be responsible for cellular efflux that is key to phloem loading and, therefore, for translocation of sucrose from photosynthetic tissue to heterotrophic tissue, such as roots, flowers and seeds. Previous studies had described a SWEET9 homolog in Petunia hybrida, PhNEC1, to be specifically expressed in nectaries, and developmental timing of PhNEC1 expression has previously been correlated inversely with nectar starch content, making this transporter a prime candidate for having a role in nectar secretion. SWEET9, a close relative of NEC1, is highly expressed in Arabidopsis nectaries.

[0134] Previous studies had identified a subfamily of SWEETs as a novel class of sucrose efflux transporters responsible for moving sucrose from phloem parenchyma, the first step of loading sucrose into the vascular conduits of the phloem. Microarray and RT-PCR analyses show that SWEET9, which shares ˜50% sequence identity with SWEET11 and 12, is specifically expressed in Arabidopsis nectaries. SWEET9 is the only SWEET highly expressed in nectaries, therefore it is conceivable that SWEET9 mediates sucrose or hexose transport for nectar production. Transport studies show that SWEET9 mediates uptake and efflux of sucrose as assayed in Xenopus oocytes. Sucrose transport activity of SWEET9 was further confirmed by coexpression of SWEET9 with a Förster Resonance Energy Transfer (FRET) sucrose sensor in human embryonic kidney cells. Together these results show that SWEET9 can mediate both uptake and efflux of sucrose, consistent with the facilitated diffusion mechanism of a sucrose uniporter. Some SWEET homologs had been shown to transport both sucrose and glucose, and although the present inventors have not been able to obtain conclusive data that exclude the possibility that SWEET9 also transports hexoses, hence SWEET9 may also function in hexose efflux.

[0135] To determine directly whether SWEET9 is involved in sugar secretion from nectaries, nectar secretion was examined in three independent T-DNA insertion mutant lines [atsweet9-1, sk225 (carries a T-DNA insertion in position −308 before start codon and had no detectable transcript levels), atsweet9-2, SALK_060256 (pos. −940 before start codon and had reduced transcript levels), atsweet9-3, SALK_202913C (pos. 779 after the start codon in exon 4 or +345 from the start codon in the cDNA, knockout line). If SWEET9 plays a role in sugar uptake into or efflux from nectaries, one may expect specific phenotypes in the mutants such as but not limited to reduced sugar content, or, if the sugar efflux creates the osmotic driving force for nectar secretion, the loss of fluid secretion. In Arabidopsis, nectar droplets accumulate inside the cups formed by sepals that surround the lateral nectaries of wild-type flowers. None of the sweet9 mutants produced detectable nectar droplets (FIG. 1c-1e). Otherwise, the mutants were indistinguishable from wild-type. As judged by scanning electron microcopy (SEM), mutant nectaries had a similar morphology as wild-type nectaries, indicating that the loss of nectar secretion was not caused by a physical defect of nectaries but by loss of sugar efflux activity.

[0136] To test if SWEET9 activity is limiting for nectar secretion, nectar secretion was analyzed in transgenic lines expressing SWEET9-GFP fusions under its native promoter in wild-type background. The extra copies of SWEET9 in wild-type background showed increased nectar volume as judged by droplet size quantification (FIG. 1f). Restoration of nectar secretion by SWEET9 or SWEET9-GFP in sweet9 mutants further supports the role of SWEET9 in nectar secretion (FIGS. 1g and 1h).

[0137] Without being bound to theory, it is possible that SWEET9 could function in at least one of at least three ways, depending on its localization. First SWEET9 may facilitate sucrose efflux at the phloem strands near nectaries, it may facilitate sugar uptake into nectary parenchyma, and/or it may facilitate sugar efflux from nectary parenchyma delivering sugars to the nectarial apoplasm. Translational fusions with GUS and eGFP under control of the SWEET9 promoter were specifically expressed in floral nectaries (FIG. 2). The highest expression was observed in the lower half of the nectary parenchyma, but not in the guard cells and phloem (FIG. 2c-d). The fluorescence intensity of SWEET9-eGFP increased during maturation, and was highest when flowers opened and when maximal nectar secretion occurs. The pattern of starch accumulation in nectaries of sweet9 mutants might be different if SWEET9 were involved in uptake into nectarial parenchyma (no starch accumulation in nectary) versus cellular efflux from nectarial cells (accumulation in nectary due to inability to export sugars). In wild type plants, starch accumulates within chloroplasts of nectary parenchyma cells before anthesis and is degraded at anthesis, serving as a source for sugar secretion.

[0138] To assess starch accumulation in sweet9-1, starch was stained with Lugol's iodine solution in fixed sections (FIG. 2f-2k). In the mutants, starch accumulated in all cells of the floral parenchyma, indicating that SWEET9 is responsible for cellular sugar efflux. Nectarial guard cells of wild-type plants contained starch granules at anthesis, but not in the sweet9 mutants. The accumulation of starch in the guard cells in wild-type nectaries may be caused by reabsorption of nectar. Taken together, the functional characterization of SWEET9 as a sucrose efflux transport, the presence of the protein in the nectary parenchyma and the pattern of starch accumulation in sweet9 mutants unable to secrete nectar, demonstrates that SWEET9 is a key transporter responsible for cellular export of sugar. High cytosolic levels of sugars in the nectarial parenchyma and extracellular hydrolysis of sucrose by a cell wall invertase create would thus facilitate the driving force for nectar secretion via this facilitated-diffusion carrier. Indeed, multiple genes in the pathway for sucrose biosynthesis were previously found to be upregulated in mature, secretory nectaries. Further, Arabidopsis nectar is a hexose:sucrose ratio of 33:1.

[0139] Since SWEET11 and 12 are plasma membrane-localized sucrose efflux transporters, we analyzed the subcellular localization of the SWEET9-promoter driven SWEET9-eGFP fusion. SWEET9-eGFP fusions localized both at the plasma membrane and the Golgi-like compartments (FIG. 2e). SWEET9 could thus operate through exocytosis or direct plasma membrane-mediated efflux. To explore any contribution of the plasma membrane localization of SWEET9 to secretion, plasma membrane localized paralogs SWEET11 and 12 were tested for their ability to restore nectar secretion in atweet9 mutants. When expressed under control of the SWEET9 promoter, both plasma membrane transporters were able to restore nectar secretion. Together, these data indicate that the impaired ability of nectar secretion of the sweet9 mutants is mainly due to reduced sugar transport across the plasma membrane. SWEET9, however, may also play a role in vesicular secretion. Except for the plasma membrane localization, SWEET9-eGFP protein also accumulated in highly mobile particles, which may be components of the Golgi or trans-Golgi network apparatus (FIG. 2e). The accumulated protein in the Golgi and Golgi-like compartments appears to serve as a reserve. Thus it is possible that SWEET9 also imports sugar into the Golgi prior to vesicular secretion.

[0140] Bioinformatic analysis from previous studies of gene expression in nectaries of Arabidopsis suggests that genes involved in sucrose biosynthesis are upregulated in nectaries, indicating that resynthesis of sucrose from starch drives sugar efflux via SWEET9. The data previous suggests that two sucrose phosphate synthase (SPS) genes, both of which encode key enzymes for sucrose biosynthesis, are induced to high levels in maturing nectaries. Indeed, the SPS1F and SPS2F genes are highly expressed in nectaries. Artificial microRNA inhibition of the expression of the two SPS genes leads to a loss of nectar secretion and altered starch accumulation, which mimics the phenotype of the sweet9 mutants (FIG. 3). The phenotype of the sweet9 mutants and the SPS-miRNA lines is also similar to that of the nectarial cell wall invertase mutant cwinv4-1 that has been published previously. Together these data demonstrate that starch-derived sucrose that synthesized in nectaries is exported by SWEET9, and that sucrose hydrolysis by CWINV4 is necessary to create a sufficient osmotic gradient to sustain water secretion (FIG. 3e).

[0141] To explore whether SWEET9 is also essential for sugar efflux from nectaries of other Brassicaceae, the ortholog of SWEET9 was identified in turnip flowers (Brassica rapa). FIGS. 1a and 1b show that BrSWEET9 also transports sucrose. BrSWEET9 has previously been identified as a nectary-expressed gene. BrSWEET9, however, is also essential for sugar efflux and nectar secretion (FIGS. 1a-b and 4a-c). B. rapa belongs to the same order as Arabidopsis within the Rosid clade, and varieties can be categorized as self-incompatible outcrossers or as a self-compatible self-fertilizers. Nectar from the Rosids A. thaliana and B. rapa is predominantly composed of hexoses, which is consistent with the role of cell wall invertase in post-secretory sucrose hydrolysis.

[0142] To test whether Asterids also use SWEET9 orthologs for nectar secretion, SWEET9 was identified in Nicotiana attenuata. NaSWEET9 was most highly expressed in nectaries, and expression was found to increase during nectary maturation (FIG. 4d). SWEET9 in N. attenuata mediated sucrose uptake and efflux when expressed in oocytes (FIG. 4f-g). Similar to SWEET9 in Brassicaceae, SWEET9 in N. attenuata was also essential for nectar secretion as shown in two independent RNAi lines (FIG. 4e). Together, thus SWEET9 also serves as a sugar efflux transporter at the plasma membrane of the nectary parenchyma and is necessary for secretion of nectar in core Eudicots.

[0143] A phylogenetic analysis tentatively traces the origin of SWEET9 to a point before the split of Eudicots (Asterids and Rosids; FIG. 4h) ˜120 mya. All genomes that were analyzed, including grasses, Selaginella and Physcomitrella, contain multiple SWEET paralogs. Evolution of SWEET9 may have occurred at the time when core Eudicots evolved. The presence of floral nectaries is also correlated with the existence of SWEET9. Wind-pollinated rice and maize (monocots), ancestral angiosperms such as Amborella, and basal eudicots such as Aquilegia do not appear to have SWEET9 orthologs. It is possible that, within a population, plants that differentiated a member of the SWEET Clade III into SWEET9 had a selective advantage in hijacking phloem sap from nearby sieve elements to create a secretion that would attract pollinators and thus achieve the greatest reproduction and outbreeding rates.

[0144] A model for the nectar secretion mechanism is shown in FIG. 3e. The accumulation of starch in the floral stalk of mutants may be taken as an indication that phloem-derived sucrose is imported into nectaries symplasmically. Sucrose is then hydrolyzed and stored either in the form of hexoses in the vacuole, or in the form of starch. During nectary maturation, sucrose is resynthesized via sucrose phosphate synthase, and SWEET9 begins to export sucrose down a concentration gradient, leading to sucrose accumulation in the apoplasm. Since SWEET9 appears to function as a uniporter, and since the cytosol contains other solutes that contribute to the osmotic potential, uniporter-driven efflux is unlikely to be solely sufficient for osmotically driven water secretion. Thus, sucrose in the apoplasm is then hydrolyzed by cell wall invertases to produce glucose and fructose, potentially doubling the osmotic driving force and allowing water to be secreted. Ultimately a high concentration sugary nectar is secreted through the open stomata. Together, the results presented herein show that SWEET9 serves as a sugar efflux transporter at the plasma membrane of the nectary parenchyma and is necessary for secretion of nectar in core Eudicots.

[0145] Microarray data show that the several proton-coupled sugar transporters including hexose transporting STPs are also expressed in nectaries (expressions is relatively low compared to SWEET9), indicating that these proton-coupled sugar transporters may serve as selective reuptake activities. The relative activities of cell wall invertase combined with selective reuptake activities may determine the final ratio of sucrose, fructose and glucose (FIG. 3e).

[0146] The observation of starch accumulation in mutant stems at the floral base emphasizes not only the significant energy investment involved in nectar production but also the lack of feedback regulation of sucrose delivery or translocation to other parts of the flower, even in self-pollinating plants such as Arabidopsis. That largely self-pollinating Arabidopsis has retained nectar production and produces volatiles and secretes sugary nectar to attract and reward potential pollinators suggests the importance of securing outcrossed progeny, even at a low rate. This outcrossing plays a role in coevolution and limits inbreeding depression. For highly self-pollinating species with no inbreeding depression, however, nectar sugar accumulation and sugar accumulation in floral stems of sweet9 or cwinv4 may attract pathogens and provide strong selection for reduced nectar production.

[0147] Here, the critical role of SWEET9 in nectar secretion has been shown by confirming its expression in nectaries, demonstrating its sucrose transport actions, and showing localization at both the plasma membrane and an intracellular compartment with features similar to the Golgi apparatus. Mutation of SWEET9 or nectary-expressed sucrose phosphate synthase genes led to complete loss of nectar secretion. Surprisingly, sugars delivered to defective nectaries accumulated in the stems at the floral base, indicating the lack of negative feedback on phloem delivery and the inability to relocate the sucrose efficiently. The function of SWEET9 in nectar secretion is conserved in Rosids and Asterids (the two major clades of core Eudicot species), by blocking its expression in A. thaliana, B. rapa and N. attenuata.

[0148] The Examples provided herein are meant for illustrative purposes of select embodiments of the present invention are not intended to limit the scope of the invention in any way.

### EXAMPLES

### Example 1

### Methods for Detecting SWEET9 Involvement in Nectar Production

[0149] Heterologous expression of SWEET9 from the three species in HEK293T cells and Xenopus oocytes was performed as established in the art. Insertion sites and reduced transcript levels were verified by PCR and qPCR. BrSWEET9 TILLING mutants were obtained from RevGen UK (John Innes Centre, Norwich, UK; revgenuk.jic.ac.uk/) via screening of previously described mutant populations. Wild-type N. attenuata lines were transformed by Agrobacterium tumefaciens (strain LBA 4404) to silence N. attenuata sweet9 (nasweet9). SPS1F and SPS2F were co-silenced via a single amiRNA targeting the mRNAs for both genes, and nectar secretion was evaluated using a compound microscope (Leica MZ6) by eye, and documented by photography. Starch was stained using potassium iodide. Flowers (stage 14˜15, at anthesis) were examined for starch accumulation by iodine—potassium iodide (IKI) staining (Jensen, 1962). Assay was performed following the protocol mentioned in Ruhlmann et al., 2009, which is incorporated by reference.

### Example 2

### Overexpression of Sugar Transporter SWEET9 Leads to Increased Nectar Secretion

[0150] The Arabidopsis SWEET9 gene encodes for a nectary-specific sugar transporter. Total nectar glucose content ratio and nectar droplet size of AtSWEET9 overexpression lines (driven by its native promoter) vs wild-type, were evaluated. Nectar glucose content was evaluated in each line and showed higher glucose content relative to wild-type nectar (2.04-2.66 times higher). In the same overexpressor lines, the volume of the nectar droplets was also evaluated, showing an average of 31% larger nectar volume compared with the wild-type droplets.

### Example 3

[0151] To investigate if the SWEET4d sugar transport activity within the seed BETL could be a liming factor for the sugar accumulation into the maize endosperm, transgenic A188 plants were generated to express both (i) full-length cDNA of gene GRMZM2G137954_T01 (SWEET4d) under the control of the rice Actin promoter, as well as (ii) full-length gDNA of gene GRMZM2G137954_T01 (SWEET4d) using as promoter the native 2 kb of 5′UTR upstream the ATG.

[0152] The plasmid used for the production plants containing construct (i) from above (SWEET4d overexpressors using cDNA) contained the backbone of vector pSB11 (Ishida et al., 1996), a Basta resistance cassette (rice Actin promoter and intron, Bar gene, and Nos terminator) next to the right border, and the SWEET4d coding sequence (lacking a stop codon) fused with the fluorescent protein GFP, under the control of the rice Actin promoter next to the left border. The plasmid used for the production of plants containing construct (ii) above (SWEET4d-overexpressors using genomic DNA) contained the backbone of vector pSB11 (Ishida et al., 1996), a Basta resistance cassette (rice Actin promoter and intron, Bar gene, and Nos terminator) next to the right border, and the SWEET4d full-length gDNA sequence (lacking a stop codon) fused with the fluorescent protein GFP, under the control of SWEET4d native promoter (2 kb) promoter next to the left border.

[0153] Agrobacterium-mediated transformation of maize inbred line A188 was based on a published protocol (Ishida et al., 2007). For each transformation event, the number of T-DNA insertions was evaluated by qRT-PCR, and the integrity of the transgene was verified by PCR.

[0154] References—all of which are incorporated by reference.
[0155] Kay, K. M. et al. Floral characters and species diversification. (Oxford University Press, 2006).
[0156] Harder, L. D. & Barrett, S. C. H. Ecology and evolution of flowers. (Oxford University Press, 2006).
[0157] Dodd, M. E., Silvertown, J. & Chase, M. W. Phylogenetic analysis of trait evolution and species diversity variation among angiosperm families. Evolution 53, 732-744 (1999).
[0158] Heilbuth, J. C. Lower species richness in dioecious clades. Am. Nat. 156, 221-241 (2000).
[0159] Sargent, R. D. Floral symmetry affects speciation rates in angiosperms. Proc. Biol. Sci. 271, 603-608 (2004).
[0160] Friedman, W. E. The meaning of Darwin's ‘abominable mystery’. Am. J. Bot. 96, 5-21 (2009).
[0161] De la Barrera, E. & Nobel, P. S. Nectar: properties, floral aspects, and speculations on origin. Trends Plant Sci. 9, 65-69 (2004).
[0162] Kessler, D., Gase, K. & Baldwin, I. T. Field experiments with transformed plants reveal the sense of floral scents. Science 321, 1200-1202 (2008).
[0163] Kessler, D. et al. Unpredictability of nectar nicotine promotes outcrossing by hummingbirds in Nicotiana attenuata. Plant J. 71, 529-538 (2012).
[0164] Nepi, M. & Pacini, E. Nectaries and nectar. (Springer, 2007).
[0165] Deeken, R. et al. Loss of the AKT2/3 potassium channel affects sugar loading into the phloem of Arabidopsis. Planta 216, 334-344 (2002).
[0166] Sime, K. R. & Baldwin, I. T. Opportunistic out-crossing in Nicotiana attenuata (Solanaceae), a predominantly self-fertilizing native tobacco. BMC Ecol. 3, 6 (2003).
[0167] Isokawa, S. et al. Novel self-compatible lines of Brassica rapa L. isolated from the Japanese bulk-populations. Genes Genet. Syst. 85, 87-96 (2010).
[0168] Davis, A. R., Pylatuik, J. D., Paradis, J. C. & Low, N. H. Nectar-carbohydrate production and composition vary in relation to nectary anatomy and location within individual flowers of several species of Brassicaceae. Planta 205, 305-318 (1998).
[0169] Huang, M. et al. The major volatile organic compound emitted from Arabidopsis thaliana flowers, the sesquiterpene (E)-β-caryophyllene, is a defense against a bacterial pathogen. New Phytol. 193, 997-1008 (2012).
[0170] Kram, B. W. & Carter, C. J. Arabidopsis thaliana as a model for functional nectary analysis. Sex. Plant Reprod. 22, 235-246 (2009).
[0171] Hoffmann, M. H. et al. Flower visitors in a natural population of Arabidopsis thaliana. Plant Biol. 5, 491-494 (2003).
[0172] Bomblies, K. et al. Local-scale patterns of genetic variability, outcrossing, and spatial structure in natural stands of Arabidopsis thaliana. PLoS Genet. 6, e1000890 (2010).
[0173] Nicolson, S. W., Nepi, M. & Pacini, E. Nectaries and nectar. (Springer, 2007).
[0174] Chen, L. Q. et al. Sugar transporters for intercellular exchange and nutrition of pathogens. Nature 468, 527-532 (2010).
[0175] Chen, L. Q. et al. Sucrose efflux mediated by SWEET proteins as a key step for phloem transport. Science 335, 207-211 (2012).
[0176] Ge, Y. X. et al. NEC1, a novel gene, highly expressed in nectary tissue of Petunia hybrida. Plant. 24, 725-734 (2000).
[0177] Kram, B. W., Xu, W. W. & Carter, C. J. Uncovering the Arabidopsis thaliana nectary transcriptome: investigation of differential gene expression in floral nectariferous tissues. BMC Plant Biol. 9, 92 (2009).
[0178] Ren, G. et al. Transient starch metabolism in ornamental tobacco floral nectaries regulates nectar composition and release. Plant Sci. 173, 277-290 (2007).
[0179] Langenberger, M. W. & Davis, A. R. Temporal changes in floral nectar production, reabsorption, and composition associated with dichogamy in annual caraway (Carum carvi; Apiaceae). Am. J. Bot. 89, 1588-1598 (2002).
[0180] Fahn, A. Structure and function of secretory cells. Adv. Bot. Res. 31, 37-75 (2000).
[0181] Gutierrez, R., Lindeboom, J. J., Paredez, A. R., Emons, A. M. & Ehrhardt, D. W. Arabidopsis cortical microtubules position cellulose synthase delivery to the plasma membrane and interact with cellulose synthase trafficking compartments. Nature Cell Biol. 11, 797-806 (2009).
[0182] Ruhlmann, J. M., Kram, B. W. & Carter, C. J. CELL WALL INVERTASE 4 is required for nectar production in Arabidopsis. J. Exp. Bot. 61, 395-404 (2010).
[0183] Hampton, M. et al. Identification of differential gene expression in Brassica rapa nectaries through expressed sequence tag analysis. PLoS ONE 5, e8782 (2010).
[0184] Davies, T. J. et al. Darwin's abominable mystery: Insights from a supertree of the angiosperms. Proc. Natl. Acad. Sci. USA 101, 1904-1909 (2004).
[0185] Flor, S. et al. Spatiotemporal reconstruction of the Aquilegia rapid radiation through next-generation sequencing of rapidly evolving cpDNA regions. New Phytol. 198, 579-592 (2013).
[0186] Whittall, J. B. & Hodges, S. A. Pollinator shifts drive increasingly long nectar spurs in columbine flowers. Nature 447, 706-709 (2007).
[0187] Ishida Y, et al. Agrobacterium-mediated transformation of maize. Nature Protocols 2, 1614-1621 (2007)
[0188] Ishida Y, et al. High efficiency transformation of maize (Zea mays L.) mediated by Agrobacterium tumefaciens. Nature Biotechnology 14, 745-750 (1996).
[0189] Wang et al. Control of rice grain-filling and yield by a gene with a potential signature of domestication. Nat Genet. November, 40(11):1370-4. (2008).
[0190] Wingenter K. et al. Increased activity of the vacuolar monosaccharide transporter TMT1 alters cellular sugar partitioning, sugar signaling, and seed yield in Arabidopsis. Plant Physiol. October, 154(2):665-77 (2010).

The application's sequence listing, which the Patent Office published only in electronic form, follows.

SEQUENCE LISTING (411 sequences)

SEQ ID NO: 1 - protein, 247 aa, Arabidopsis thaliana
MNIAHTIFGVFGNATALFLFLAPSITFKRIIKNKSTEQFSGIPYPMTLLNCLLSAWYGLPFVSKDNTLVSTINGTGAVIETVYVLIFLFYAPKKEKIKIFGIFSCVLAVFATVALVSLFALQGNGRKLFCGLAATVFSIIMYASPLSIMRLVVKTKSVEFMPFFLSLFVFLCGTSWFVYGLIGRDPFVAIPNGFGCALGTLQLILYFIYCGNKGEKSADAQKDEKSVEMKDDEKKQNVVNGKQDLQV

SEQ ID NO: 2 - protein, 236 aa, Arabidopsis thaliana
MDVFAFNASLSMCKDVAGIAGNIFAFGLFVSPMPTFRRIMRNKSTEQFSGLPYIYALLNCLICLWYGTPFISHSNAMLMTVNSVGATFQLCYIILFIMHTDKKNKMKMLGLLFVVFAVVGVIVAGSLQIPDQLTRWYFVGFLSCGSLVSMFASPLFVINLVIRTKSVEFMPFYLSLSTFLMSASFLLYGLFNSDAFVYTPNGIGTILGIVQLALYCYYHRNSIEEETKEPLIVSYV

SEQ ID NO: 3 - protein, 263 aa, Arabidopsis thaliana
MGDKLRLSIGILGNGASLLLYTAPIVTFSRVFKKKSTEEFSCFPYVMTLFNCLIYTWYGLPIVSHLWENLPLVTINGVGILLESIFIFIYFYYASPKEKIKVGVTFVPVIVGFGLTTAISALVFDDHRHRKSFVGSVGLVASISMYGSPLVVMKKVIETRSVEYMPFYLSFFSFLASSLWLAYGLLSHDLFLASPNMVATPLGILQLILYFKYKNKKDLAPTTMVITKRNDHDDKNKATLEFVVDVDRNSDTNEKNSNNASSI

SEQ ID NO: 4 - protein, 251 aa, Arabidopsis thaliana
MVNATVARNIAGICGNVISLFLFLSPIPTFITIYKKKKVEEYKADPYLATVLNCALWVFYGLPMVQPDSLLVITINGTGLAIELVYLAIFFFFSPTSRKVKVGLWLIGEMVFVGIVATCTLLLFHTHNQRSSFVGIFCVIFVSLMYIAPLTIMSKVIKTKSVKYMPFSLSLANFLNGVVWVIYALIKFDLFILIGNGLGTVSGAVQLILYACYYKTTPKDDEDEEDEENLSKVNSQLQLSGNSGQAKRVSA

SEQ ID NO: 5 - protein, 240 aa, Arabidopsis thaliana
MTDPHTARTIVGIVGNVISFGLFCAPIPTMVKIWKMKSVSEFKPDPYVATVLNCMMWTFYGLPFVQPDSLLVITINGTGLFMELVYVTIFFVFATSPVRRKITIAMVIEVIFMAVVIFCTMYFLHTTKQRSMLIGILCIVFNVIMYAAPLTVMKLVIKTKSVKYMPFFLSLANFMNGVVWVIYACLKFDPYILIPNGLGSLSGIIQLIIYITYYKTTNWNDDDEDKEKRYSNAGIELGQA

SEQ ID NO: 6 - protein, 261 aa, Arabidopsis thaliana
MVHEQLNLIRKIVGILGNFISLCLFLSPTPTFIHIVKKKSVEKYSPLPYLATLLNCLVRALYGLPMVHPDSTLLVTISGIGITIEIVFLTIFFVFCGRQQHRLVISAVLTVQVVFVATLAVLVLTLEHTTDQRTISVGIVSCVFNAMMYASPLSVMKMVIKTKSLEFMPFLLSVVGFLNAGVWTIYGFVPFDPFLAIPNGIGCVFGLVQLILYGTYYKSTKGIMEERKNRLGYVGEVGLSNAIAQTEPENIPYLNKRVSGV

SEQ ID NO: 7 - protein, 258 aa, Arabidopsis thaliana
MVFAHLNLLRKIVGIIGNFIALCLFLSPTPTFVRIVKKKSVEEYSPIPYLATLINCLVWVLYGLPTVHPDSTLVITINGTGILIEIVFLTIFFVYCGRQKQRLIISAVIAAETAFIAILAVLVLTLQHTTEKRTMSVGIVCCVFNVMMYASPLSVMKMVIKTKSVEFMPFWLSVAGFLNAGVWTIYALMPFDPFMAIPNGIGCLFGLAQLILYGAYYKSTKRIMAERENQPGYVGLSSAIARTGSEKTANTNQEPNNV

SEQ ID NO: 8 - protein, 239 aa, Arabidopsis thaliana
MVDAKQVRFIIGVIGNVISFGLFAAPAKTFWRIFKKKSVEEFSYVPYVATVMNCMLWVFYGLPVVHKDSILVSTINGVGLVIELFYVGVYLMYCGHKKNHRRNILGFLALEVILVVAIILITLFALKGDFVKQTFVGVICDVFNIAMYGAPSLAIIKVVKTKSVEYMPFLLSLVCFVNAGIWTTYSLIFKIDYYVLASNGIGTFLALSQLIVYFMYYKSTPKEKTVKPSEVEISATERV

SEQ ID NO: 9 - protein, 258 aa, Arabidopsis thaliana
MFLKVHEIAFLFGLLGNIVSFGVFLSPVPTFYGIYKKKSSKGFQSIPYICALASATLLLYYGIMKTHAYLIISINTFGCFIEISYLFLYILYAPREAKISTLKLIVICNIGGLGLLILLVNLLVPKQHRVSTVGWVCAAYSLAVFASPLSVMRKVIKTKSVEYMPFLLSLSLTLNAVMWFFYGLLIKDKFIAMPNILGFLFGVAQMILYMMYQGSTKTDLPTENQLANKTDVNEVPIVAVELPDVGSDNVEGSVRPMK

SEQ ID NO: 10 - protein, 289 aa, Arabidopsis thaliana
MAISQAVLATVFGILGNIISFFVCLAPIPTFVRIYKRKSSEGYQSIPYVISLFSAMLWMYYAMIKKDAMMLITINSFAFVVQIVYISLFFFYAPKKEKTLTVKFVLFVDVLGFGAIFVLTYFIIHANKRVQVLGYICMVFALSVFVAPLGIIRKVIKTKSAEFMPFGLSFFLTLSAVMWFFYGLLLKDMNIALPNVLGFIFGVLQMILFLIYKKPGTKVLEPPGIKLQDISEHVVDVVRLSTMVCNSQMRTLVPQDSADMEATIDIDEKIKGDIEKNKDEKEVFLISKN

SEQ ID NO: 11 - protein, 289 aa, Arabidopsis thaliana
MSLFNTENTWAFVFGLLGNLISFAVFLSPVPTFYRIWKKKTTEGFQSIPYVVALFSATLWLYYATQKKDVFLLVTINAFGCFIETIYISMFLAYAPKPARMLTVKMLLLMNFGGFCAILLLCQFLVKGATRAKIIGGICVGFSVCVFAAPLSIIRTVIKTRSVEYMPFSLSLTLTISAVIWLLYGLALKDIYVAFPNVLGFALGALQMILYVVYKYCKTSPHLGEKEVEAAKLPEVSLDMLKLGTVSSPEPISVVRQANKCTCGNDRRAEIEDGQTPKHGKQSSSAAAT

SEQ ID NO: 12 - protein, 285 aa, Arabidopsis thaliana
MALFDTHNTWAFVFGLLGNLISFAVFLSPVPTFYRICKKKTTEGFQSIPYVVALFSAMLWLYYATQKKDVFLLVTINSFGCFIETIYISIFVAFASKKARMLTVKLLLLMNFGGFCLILLLCQFLAKGTTRAKIIGGICVGFSVCVFAAPLSIIRTVIKTKSVEYMPFSLSLTLTISAVIWLLYGLALKDIYVAFPNVIGFVLGALQMILYVVYKYCKTPSDLVEKELEAAKLPEVSIDMVKLGTLTSPEPVAITVVRSVNTCNCNDRNAEIENGQGVRNSAATT

SEQ ID NO: 13 - protein, 294 aa, Arabidopsis thaliana
MALTNNLWAFVFGILGNIISFVVFLAPVPTFVRICKKKSTEGFQSLPYVSALFSAMLWIYYAMQKDGTAFLLITINAFGCVIETIYIVLFVSYANKKTRISTLKVLGLLNFLGFAAIVLVCELLTKGSTREKVLGGICVGFSVSVFAAPLSIMRVVVRTRSVEFMPFSLSLFLTISAVTWLFYGLAIKDFYVALPNVLGAFLGAVQMILYIIFKYYKTPVAQKTDKSKDVSDHSIDIAKLTTVIPGAVLDSAVHQPPALHNVPETKIQLTEVKSQNMTDPKDQINKDVQKQSQV

SEQ ID NO: 14 - protein, 281 aa, Arabidopsis thaliana
MVLTHNVLAVTFGVLGNIISFIVFLAPVPTFVRICKKKSIEGFESLPYVSALFSAMLWIYYALQKDGAGFLLITINAVGCFIETIYIILFITYANKKARISTLKVLGLLNFLGFAAIILVCELLTKGSNREKVLGGICVGFSVCVFAAPLSIMRVVIRTKSVEFMPFSLSLFLTISAITWLFYGLAIKDFYVALPNILGAFLGAVQMILYVIFKYYKTPLVVDETEKPKTVSDHSINMVKLSSTPASGDLTVQPQTNPDVSHPIKTHGGDLEDQMDKKMPN

SEQ ID NO: 15 - protein, 292 aa, Arabidopsis thaliana
MGVMINHHFLAFIFGILGNVISFLVFLAPVPTFYRIYKRKSTESFQSLPYQVSLFSCMLWLYYALIKKDAFLLITINSFGCVVETLYIAMFFAYATREKRISAMKLFIAMNVAFFSLILMVTHFVVKTPPLQVSVLGWICVAISVSVFAAPLMIVARVIKTKSVEYMPFTLSFFLTISAVMWFAYGLFLNDICIAIPNVVGFVLGLLQMVLYLVYRNSNEKPEKINSSEQQLKSIVVMSPLGVSEVHPVVTESVDPLSEAVHHEDLSKVTKVEEPSIENGKCYVEATRPETV

SEQ ID NO: 16 - protein, 230 aa, Arabidopsis thaliana
MADLSFYVGVIGNVISVLVFLSPVETFWRIVQRRSTEEYECFPYICTLMSSSLWTYYGIVTPGEYLVSTVNGFGALAESIYVLIFLFFVPKSRFLKTVVVVLALNVCFPVIAIAGTRTLFGDANSRSSSMGFICATLNIIMYGSPLSAIKTVVTTRSVQFMPFWLSFFLFLNGAIWGVYALLLHDMFLLVPNGMGFFLGIMQLLIYAYYRNAEPIVEDEEGLIPNQPLLA

SEQ ID NO: 17 - protein, 241 aa, Arabidopsis thaliana
MAEASFYIGVIGNVISVLVFLSPVETFWKIVKRRSTEEYKSLPYICTLLGSSLWTYYGIVTPGEYLVSTVNGFGALVETIYVSLFLFYAPRHLKLKTVDVDAMLNVFFPIAAIVATRSAFEDEKMRSQSIGFISAGLNIIMYGSPLSAMKTVVTTKSVKYMPFWLSFFLFLNGAIWAVYALLQHDVFLLVPNGVGFVFGTMQLILYGIYRNAKPVGLSNGLSEIAQDEEEGLTSRVEPLLS

SEQ ID NO: 18 - protein, 273 aa, Oryza sativa
MEHIARFFFGVSGNVIALFLFLSPVVTFWRIIKKRSTEDFSGVPYNMTLLNCLLSAWYGLPFVSPNNILVTTINGTGSVIEAIYVVIFLIFAERKARLKMMGLLGLVTSIFTMVVLVSLLALHGQGRKLFCGLAATIFSICMYASPLSIMRLVIKTKSVEFMPFLLSLSVFLCGTSWFIYGLLGRDPFIAIPNGCGSFLGLMQLILYAIYRNHKGATPAAAAGKGDAADEVEDAKKAAAAVEMADAKTNKVVADDADADADGKSADDKVASQV

SEQ ID NO: 19 - protein, 261 aa, Oryza sativa
MEDLAKFLFGVSGNVIALFLFLSPVPTFWRIIRRKSTEDFSGVPYNMTLINCLLSAWYGLPFVSPNNILVSTINGAGAVIETAYVVVFLVFASTHKTRLRTLGLAAAVASVFAAVALVSLLALHGQHRKLLCGVAATVCSICMYASPLSIMRLVIKTKSVEYMPFLMSLAVFLCGTSWFIYGLLGRDPFVTIPNGCGSFLGAVQLVLYAIYRNNKGAGGGSGGKQAGDDDVEMAEGRNNKVADGGAADDDSTAGGKAGTEV

SEQ ID NO: 20 - protein, 243 aa, Oryza sativa
MMNALGLSVAATSTGSPFHDVCCYGAGIAGNIFALVLFISPLPTFKRIVRNGSTEQFSAMPYIYSLLNCLICLWYGLPFVSYGVVLVATVNSIGALFQLAYTATFIAFADAKNRVKVSSLLVMVFGVFALIVYVSLALFDHQTRQLFVGYLSVASLIFMFASPLSIINLVIRTKSVEYMPFYLSLSMFLMSVSFFAYGVLLHDFFIYIPNGIGTVLGVIQLVLYGYFRKGSREDSLPLLVTHT

SEQ ID NO: 21 - protein, 230 aa, Oryza sativa
MDSLYDISCFAAGLAGNIFALALFLSPVTTFKRILKAKSTERFDGLPYLFSLLNCLICLWYGLPWVADGRLLVATVNGIGAVFQLAYICLFIFYADSRKTRMKIIGLLVLVVCGFALVSHASVFFFDQPLRQQFVGAVSMASLISMFASPLAVMGVVIRSESVEFMPFYLSLSTFLMSASFALYGLLLRDFFIYFPNGLGLILGAMQLALYAYYSRKWRGQDSSAPLLLA

SEQ ID NO: 22 - protein, 246 aa, Oryza sativa
MFPDIRFIVGIIGSVACMLLYSAPILTFKRVIKKASVEEFSCIPYILALFSCLTYSWYGFPVVSYGWENMTVCSISSLGVLFEGTFISIYVWFAPRGKKKQVMLMASLILAVFCMTVFFSSFSIHNHHIRKVFVGSVGLVSSISMYGSPLVAMKQVIRTKSVEFMPFYLSLFTLFTSLTWMAYGVIGRDPFIATPNCIGSIMGILQLVVYCIYSKCKEAPKVLHDIEQANVVKIPTSHVDTKGHNP

SEQ ID NO: 23 - protein, 252 aa, Oryza sativa
MVSNTIRVAVGILGNAASMLLYAAPILTFRRVIKKGSVEEFSCVPYILALFNCLLYTWYGLPVVSSGWENSTVSSINGLGILLEIAFISIYTWFAPRERKKFVLRMVLPVLAFFALTAIFSSFLFHTHGLRKVFVGSIGLVASISMYSSPMVAAKQVITTKSVEFMPFYLSLFSFLSSALWMIYGLLGKDLFIASPNFIGCPMGILQLVLYCIYRKSHKEAEKLHDIDQENGLKVVTTHEKITGREPEAQRD

SEQ ID NO: 24 - protein, 259 aa, Oryza sativa
MVSPDTIRTAIGVVGNGTALVLFLSPVPTFIRIWKKGSVEQYSAVPYVATLLNCMMWVLYGLPAVHPHSMLVITINGTGMAIELTYIALFLAFSLGAVRRRVLLLLAAEVAFVAAVAALVLNLAHTHERRSMIVGILCVLFGTGMYAAPLSVMKMVIQTKSVEYMPLFLSLASLVNGICWTAYALIRFDLYITIPNGLGVMFAVAQLILYAIYYKSTQQIIEARKRKEADHVAMTDVVVDSAKNNPSSGAAAAAANGRY

SEQ ID NO: 25 - protein, 237 aa, Oryza sativa
MVMNPDAVRNVVGIIGNLISFGLFLSPLPTFVTIVKKKDVEEFVPDPYLATFLNCALWVFYGLPFIHPNSILVVTINGTGLLIEIAYLAIYFAYAPKPKRCRMLGVLTVELVFLAAVAAGVLLGAHTYDKRSLIVGTLCVFFGTLMYAAPLTIMKQVIATKSVEYMPFTLSLVSFINGICWTIYAFIRFDILITIPNGMGTLLGAAQLILYFCYYDGSTAKNKGALELPKDGDSSAV

SEQ ID NO: 26 - protein, 259 aa, Oryza sativa
MISPDAARNVVGIIGNVISFGLFLAPVPTFWRICKRKDVEEFKADPYLATLLNCMLWVFYGIPVVHPNSILVVTINGIGLLVEGTYLLIFFLYSPNKKRLRMCAVLGVELVFMLAVILGVLLGAHTHEKRSMIVGILCVFFGSIMYFSPLTIMGKVIKTKSVEYMPFFLSLVCFLNGVCWTAYALIRFDIYVTIPNGLGALFGAIQLILYACYYRTTPKKTKAAKDVEMPSVVVSGTGAAAAAGGGNTGGGSVSVTVER

SEQ ID NO: 27 - protein, 254 aa, Oryza sativa
MISPDAARNVVGIIGNVISFGLFLSPVPTFWRICKRKDVEQFKADPYLATLLNCMLWVFYGIPIVHPNSILVVTINGIGLIVEGTYLFIFFLYSPNKKRLRMLAVLGVELVFMLAVILGVLLSAHTHKKRSMIVGILCVFFGSIMYFSPLTIMGKVIKTKSVEYMPFFLSLVCFLNGVCWTAYALIRFDIYVTIPNGLGAIFGAIQLILYACYYRTTPKKTKAAKDVEMPSVISGPGAAATASGGSVVSVTVER

SEQ ID NO: 28 - protein, 264 aa, Oryza sativa
  misc_feature (40)..(40): Xaa can be any naturally occurring amino acid
MVSPDMIRNVVGIVGNVISFGLFLSPVPTFWQIIKNKNVXDFKTDPYLATLLNCMLWDFYGLPIVHPNSILVVTINGIGLVIEAVYLTIFFLFSDKKNKKKMEVVLAAEALFMAAVALGVLLGVHTHQRRSLIVGILCVIFDTIMYSSPLTVMSQVVKTKSVEYMPLLLSVVSFLNGLYWTSYTLIRFDIFITIPNGLGVLFAAVQLILYVIYYRTTPKKQNKNLELPTVTPVAKDTSVGPISKDNDLNGSTASHVTIDITIQP

SEQ ID NO: 29 - protein, 265 aa, Oryza sativa
MVSPDLIRNMVGIVGNIISFGLFLSPVPTFYRIIKNKDVQDFKADPYLATLLNCMLWVFYGLPIVHPNSILVVTINGIGLVIEAVYLTIFFLFSDKKNKKKMGVVLATEALFMAAVVLGVLLGAHTHQRRSLIVGILCVIFGTIMYSSPLTIMSQVVKTKSVEYMPLLLSVVSFLNGLCWTSYALIRLDIFITIPNGLGVLFALMQLILYAIYYRTIPKKQDKNLELPTVAPVAKDTSIVTPVSKDDDVDGGNASHVTINITIEL

SEQ ID NO: 30 - protein, 263 aa, Oryza sativa
MVSPDLIRNVVGIVGNVISFGLFLSPVPIFWRIIKNKNVQNFKADPYLATLLNCMLWVFYVLPIVHPNSILVVTINGISLVIEAVYLTIFFLFSDKKNKKKMGVVLATEALFMAAVAVGVLLGAHTHQRRSLIVGILCVIFGTIMYSSPLTIMVVKTKSVEYMPLLLSVVSFLNGLCWTLYALIRFDIFITIPNGLGVLFAIMQLILYAIYYRTTPKKQDKNLELPTVAPIAKDTSIVAPVSNDDDVNGSTASHATINITIEP

SEQ ID NO: 31 - protein, 274 aa, Oryza sativa
MVPDLIRNVVGIVGNVISFGLFLSPVPTFWRIIKNKDVRDFKADQYLATLLNCMLWVFYGLPIVHPNSILVVTINGIGLVIEAVYLTIFFLFSDKKNKKKMGVVLATEALFMAAVALGVLLDAHTHQRRSLIVGILCVIFGTIMYSSPLTIMSQVVKTKSVEYMPLLLSVVSFLNGLCWTSYALIRFDIFITIPNGLGVLFALMQLILYAIYYRTTPKKPSTTGPHPRSRIRTSSYQPSPPSPRAPASSPLSARTTTSMAAMSPSISRLSHKLA

SEQ ID NO: 32 - protein, 256 aa, Oryza sativa
MVSPDLIRNVVGIVGNAISFGLFLSPVLTFWRIIKEKDMKYFKADPYLATLLNCMLWVFYGLPIVHPNSILVVTINGIGLVIEAVYLTIFFLFSNKKNKKMGVVLATEALFMAAVALGVLLGAHTHQRRSLIVGILCVIFGTIMYSSPLTIMSQVVKTKSVEYMPLLLSVVSFLNGLCWTSYALIRFDIFITIPNGLGVLFTLMQLILDKNQDKNLELPTVAPVAKETSIVTPVSKDDDINGSTASHVIINITKEP

SEQ ID NO: 33 - protein, 307 aa, Oryza sativa
MAGGFLSMANPAVTLSGVAGNIISFLVFLAPVATFLQVYKKKSTGGYSSVPYVVALFSSVLWIFYALVKTNSRPLLTINAFGCGVEAAYIVLYLVYAPRRARLRTLAFFLLLDVAAFALIVVTTLYLVPKPHQVKFLGSVCLAFSMAVFVAPLSIIFKVIKTKSVEFMPIGLSVCLTLSAVAWFCYGLFTKDPYVMYPNVGGFFFSCVQMGLYFWYRKPRNTAVLPTTSDSMSPISAAAAATQRVIELPAGTHAFTILSVSPIPILGVHKVEVVAAEQAADGVAAAAAADKELLQNKPEVIEITAAV

SEQ ID NO: 34 - protein, 300 aa, Oryza sativa
MVQALVFAVGIVGNILSFLVILAPVPTFYRVYKKKSTESFQSVPYAVALLSAMLWLYYALLTSDLLLLSINSIGCLVESLYLTVYLLYAPRQAMAFTLKLVCAMNLALFAAVVAALQLLVKATDRRVTLAGGIGASFALAVFVAPLTIIRQVIRTKSVEFMPFWLSFFLTLSAVVWFFYGLLMKDFFVATPNVLGLLFGLAQMVLYVVYKNPKKNSAVSEAAAAQQVEVKDQQQLQMQLQASPAVAPLDVDADADADLEAAAPATPQRPADDDAIDHRSVVVDIPPPPQPPPALPAVEVA

SEQ ID NO: 35 - protein, 296 aa, Oryza sativa
MAGLSLQHPWAFAFGLLGNLISFTTYLAPIPTFYRIYKSKSTEGFQSVPYVVALFSAMLWIFYALIKSNEALLITINAAGCVIETIYIVMYLAYAPKKAKVFTTKILLLLNVGVFGVILLLTLLLSHGEQRVVSLGWVCVAFSVSVFVAPLSIIKRVIQSRSVEYMPFSLSLTLTLSAVVWFLYGLLIKDKYVALPNILGFTFGVVQMGLYVFYMNATPVAGEGKEGKGKLAAAEELPVVVNVGKLAAATPDRSTGAVHVHPVPRSCAAEAAAAEPEVLVDIPPPPPPRAVEVAAV

SEQ ID NO: 36 - protein, 303 aa, Oryza sativa
MAGMSLQHPWAFAFGLLGNIISFMTYLAPLPTFYRIYKSKSTQGFQSVPYVVALFSAMLWIYYALLKSDECLLITINSAGCVIETIYIAVYLVYAPKKAKMFTAKLLLLVNVGVFGLILLLTLLLSAGDRRIVVLGWVCVGFSVSVFVAPLSIIRLVVRTKSVEFMPFSLSFSLTISAVVWFLYGLLIKDKYVALPNVLGFSFGVIQMGLYAMYRNSTPKAVLTKEVEAATATGDDDHSAAGVKEHVVNIAKLSAAVDVVKTREVHPVDVESPPAEAPPEEDDKAAAATAAAVAGAGEKKVAA

SEQ ID NO: 37 - protein, 319 aa, Oryza sativa
MAFMSMERSTWAFTFGILGNLISLMVFLSPLPTFYRVYRKKSTEGFQSTPYVVTLFSCMLWMYYAFVKSGAELLVTINGVGCVIETVYLAMYLAYAPKSARMLTAKMLLGLNIGLFGVIALVTLLLSRGELRVHVLGWICVAVSLSVFAAPLSIIRLVIRTKSVEFMPFSLSFFLVLSAVIWFLYGLLKKDVFVALPNVLGFVFGVAQMALYMAYRSKKPLVASSSSAVVAAGLEIKLPEHVKEVQAVAKGAVAAAPEGRISCGAEVHPIDDVMPSEVVEVKVDDEETNRTDEMAGDGDHAMVRTEQIIKPDMAIVVEV

SEQ ID NO: 38 - protein, 328 aa, Oryza sativa
MADPSFFVGIVGNVISILVFASPIATFRRIVRSKSTEEFRWLPYVTTLLSTSLWTFYGLHKPGGLLIVTVNGSGAALEAIYVTLYLAYAPRETKAKMVKVVLAVNVGALAAVVAVALVALHGGVRLFVVGVLCAALTIGMYAAPMAAMRTVVKTRSVEYMPFSLSFFLFLNGGVWSVYSLLVKDYFIGIPNAIGFALGTAQLALYMAYRRTKKPAGKGGDDDEDDEEAQGVARLMGHQVEMAQQRRDQQLRKGLSLSLPKPAAPLHGGLDRIIKSFSTTPIELHSILHQHHGGHHHHHRFDTVPDDDDEAVAAGGTTPATTAGPGDRH

SEQ ID NO: 39 - protein, 267 aa, Zea mays
MEHIARFFFGVSGNVIALFLFLSPVVTFWRVIRKRSTEDFSGVPYNMTLLNCLLSAWYGLPFVSPNNILVSTINGTGSVIEAIYVVIFLIFAVDRRARLSMLGLLGIVASIFTTVVLVSLLALHGNARKVFCGLAATIFSICMYASPLSIMRLVIKTKSVEFMPFLLSLAVFLCGTSWFIYGLLGRDPFIIIPNGCGSFLGLMQLILYAIYRKNKGPAAPAGKGEAAAAAAEVEDTKKVAAAVELADATTNKAADAVGGDGKVASQV

SEQ ID NO: 40 - protein, 250 aa, Zea mays
MEDVVKFVFGVSGNVIALFLFLSPVPTFWRIIRRKSTEDFSGVPYSMTLLNCLLSAWYGLPFVSPNNMLVSTINGAGAAIEAVYVVIFLAFASSQRTRLRMLGLASAVSAAFAAVALASMLALHGQGRKLMCGLAATVCSICMYASPLSIMRLVVKTKSVEYMPFLLSLAVFLCGTSWFVYGLLGRDPFVAIPNGCGSFLGAVQLVLYAIYRDSNSGGKQQAGDDVEMASDAKSSKKVADDVGGKEDRLV

SEQ ID NO: 41 - protein, 243 aa, Zea mays
MDWDAPALTSFVADLSFRHLCCYGAGIAGNAFAFVLFVSPLPTFKRIVRNGSTEQFSCTPYIYSLLNCLICMWYGLPFVSYGVVLVATVNSIGAVFQLAYTAVFIAFADAKQRLKVSALLAAVFLVFGLIVFVSLALLDHKARQVFVGYLSVASLVCMFASPMSIVNLVIRTKSVEYMPFYLSLSMFLMSASFVIYGVLLGDGFIYIPNGIGTILGIVQLLLYAYIRKGSSEEAKLPLLITHT

SEQ ID NO: 42 - protein, 238 aa, Zea mays
MVTSIRVIVGIIGSVVCVLLYAVPVLTFKRVVKEASVGEFSCVPYILALFSAFTWGWYGFPIVSDGWENLSLFGTCAVGVLFEASFVVVYVWFAPRDKKKSVVLMVSLVVATLCVIVSLSSFVFHTHHMRKQFVGSIGIVTSISMYSAPLVAVKQVILTKSVEFMPFYLSLFSLLTSFTWMLYGILGRDPYLTAPNGAGCLTGLLQIAVYCIYSRCNRPPKAVNGATTSREDANDCKV

SEQ ID NO: 43 - protein, 327 aa, Zea mays
MVPDTVRVAVGILGNAASMLLYTTPILTFRWVIRKGNVEEFSCVPYILALLNCLLYTWYGLPVVSSGWENLPVATINGLGILLEVAFIAIYLRFAPAEKKRFALQLVLPALALFGLTAALSSFAARTHRSRKAFVGSVGLVASVSMYTSPMVAAKRVIATKSVEFMPFSLSLFSFLSSALWMAYGLLGRDLFIASPNFIGVPVGVLQLLLYCIYRRDHGAAAGAEAQAHGPAAAADQEKGMKAAAPVAVQPQENPLCVVSVCEVNVSLSPSAAQAQHRTGLSKSNEIEGLALGLYGHIAATQLLRTTYTDQQIHLWRVWFMKSLYTS

SEQ ID NO: 44 - protein, 252 aa, Zea mays
MISPDTIRTAIGVIGNGTALVLFLSPVPTFIRIWKKGSVEQYSPIPYVATLLNCMMWVLYGLPAVHPHSMLVITINGTGMAIQLTYVALFLLYSVGAARRKVVLLLAAEVGFVGAVAALVLSLAHTHERRSMVVGILCVLFGTGMYAAPLSVMKMVIQTKSVEYMPLFLSLASLVNGICWTAYALIRFDLYITIPNGLGVLFAVAQLVLYAIYYKSTQEIIEARKRKADQIAMTGVVVDGGKTNNQAGAGQY

SEQ ID NO: 45 - protein, 255 aa, Zea mays
MVSSDTIRTAIGVIGNGTALVLFLSPVPTFIRIWKKGSVEQYSPIPYVATLLNCMMWVLYGLPLVHPHSMLVITINGTGMLIQLTYVALFLVYSAGAARRKVSLLLAAEVAFVGAVAALVLALAHTHERRSMVVGILCVLFGTGMYAAPLSVMKMVIQTKSVEYMPLFLSLASLVNGICWTAYALIRFDLYITIPNGLGVLFALAQLLLYAIYYKNTQKIVEARKRKAGQVAMTEVVVDGSRASNNNNNGGSGTY

SEQ ID NO: 46 - protein, 261 aa, Zea mays
MVSADTIRTAIGVIGNGTALVLFLSPVPTFVGIWKKRAVEQYSPIPYVATLLNCMMWVLYGLPLVHPHSMLVVTINGTGMLIQLTYVALFILCSAGAVRRRVVLLFAAEVAFVVALAALVLTLAHTHERRSMLVGIVSVFFGTGMYAAPLSVMKLVIQTKSVEYMPLFLSLASLANSICWTAYALIRFDLYITIPNGLGVLFALGQLGLYAMFYKNTKQIMEARRRKADQQSTMMEVVTDASATPPPPPNNNNGGGGGNGY

SEQ ID NO: 47 - protein, 244 aa, Zea mays
MISPDAARNVVGIIGNVISFGLFLSPVLTFWRIYKAKDVEEFKPDPYLATLLNCMLWVFYGIPVVHPNSILVVTINGIGLVIEAVYLTIFFLYSDSQKRKKAFAILAVEILFMVAVVLGVILGAHTHEKRSMIVGILCVIFGSMMYASPLTIMSRVIKTKSVEYMPFLLSLVSFLNGCCWTAYALIRFDLYVTIPNALGAFFGLVQLILYFCYYKSTPKKEKNVELPTVSSNVGGGNVTVSVER

SEQ ID NO: 48 - protein, 243 aa, Zea mays
MISPDAARNVVGIIGNVISFGLFLSPVLTFWRICKARDVEEFKPDPYLATLLNCMLWVFYGIPVVHPNSILVVTINGVGLVIEAIYLTIFFLYSDGPKRRKAFGILAVEILFMVAVVLGVILGAHTHEKRSMIVGILCVIFGSMMYASPLTIMSRVIKTKSVEYMPFLLSLVSFLNGCCWTAYALIRFDLYVTIPNALGAFFGLIQLILYFCYYKSTPKEKNVELPTVSSNAGGGNVTVSVER

SEQ ID NO: 49 - protein, 310 aa, Zea mays
MAGGFFSMAHPAVTLSGIAGNIISFLVFLAPVATFLQVYRKKSTGGFSSVPYVVALFSSVLWIFYALVKTNSRPLLTINAFGCGVEAAYIVLYLAYAPRRARLRTLAYFFLLDVAAFALVVAVTLFAVREPHRVKFLGSVCLAFSMAVFVAPLSIIVKVVKTKSVEFLPISLSFCLTLSAVAWFCYGLFTKDPFVMYPNVGGFFFSCVQMGLYFWYRKPRPAAKNNAVLPTTTDGANAVQVQGQVIELAPNTVAILSVSPIPIVGVHKIEVVEQQHKEAAVAAETRRMAAANPDGAMPEVIEIVPAAAAV

SEQ ID NO: 50 - protein, 306 aa, Zea mays
MITVGHPVVFAVGILGNILSFLVTLAPVPTFYRVYKKKSTESFQSVPYVVALLSAMLWLYYALLSVDLLLLSINTIACVVESVYLAIYLTYAPKPAMAFTLKLLCTMNMGLFGAMVAFLQFYVDGQRRVSIAGGVGSAFAFAVFVAPLTIIRQVIRTKSVEFMPFWLSFFLTVSAVAWFFYGLLMKDFFVAMPNVLGLLFGLAQMALYFVYRNRNPKKNGAVSEMQQAAAVQADAEKEQQLRQADADADADGKAATTDDDGGQTAVVVDIMPPPPLLPAERAPPLPLPPHPAMVMTTAHQTAVEVV

SEQ ID NO: 51 - protein, 305 aa, Zea mays
MITVGHPVAFAVGILGNILSFLVILAPVPTFYRVYAKKSTESFQSVPYVVALLSATLWLYYALLSTDLLLLSINTVACVAESVYLAVYLAYAPGPAKAFTLKLLCAINMGLFGAMVAFLQFYVVDTQRRVSIAGGVGAAFALAVFVAPLAIIRRVMRTKSVEFMPFWLSFFLTVSAVVWFFYGLLIKDFFVAMPNVLGLLFGLAQMVLFFVYRNRNPKKNGAVSEMQQAAVQADAEKERRSHANADGEADVRTVIVDIMPPPPAMMRHADREARGGAGTGRRAAAREQGGARRREDREALGGGGI

SEQ ID NO: 52 - protein, 302 aa, Zea mays
MAGMSLQHPWAFAFGLLGNVISFMTFLAPIPTFYRIYKSKSTEGFQSVPYVVALFSAMLWIFYALIKSNETFLITINAAGCVIETIYVVMYFVYAPKKAKLFTAKIMVLLNGGVFGVILLLTLLLFKGSKRVVLLGWICVGFSVSVFVAPLSIMRRVIQTKSVEYMPFSLSLSLTLSAVVWFLYGLLIKDKYVALPNILGFTFGVVQMVLYVLYMNKTPVAATAEGKDAGKLSSAADEHVLVNIAKLSPALPERSSGVHPVTQMAGVPVRSCAAEATAPAMLPNRDVVDVFVSRHSPAVHVA

SEQ ID NO: 53 - protein, 301 aa, Zea mays
MAGLSLEHPWAFAFGLLGNVISFMTFLAPIPTFYRIYKSKSTEGFQSVPYVVALFSAMLWIFYALIKSNETFLITINAAGCVIETIYIVMYFVYAPKKAKLFTAKIMALLNGGVFGVILLLTLLLFKGSKRVVLLGWICVGFSVSVFVAPLSIMRRVIQTKSVEYMPFSLSLSLTLSAVVWFLYGLLIKDKYVALPNVLGFIFGVVQMVLYVFYMNKTPVAAAVGKDAGKLPSAADEHVLVNIAKLNPALPERTSGMHPVTQMAAVPARSCAAEAIAPAMLPNRDVVDVFVSRHSPAVHVV

SEQ ID NO: 54 - protein, 160 aa, Zea mays
MAGLSLQHPWAFTFGLLGNVISFMTFLAPIPTFYRIYKSKSTEGFQSVPYVVALFSAMLWIFYALIKSNETFLITINAAGCVIETVYVVMYFVYATKKGRMFTAKIMLLLNVGAFGAILLLTLLLFKGDKRVVMLGWICVGFSVSVFVAPLSIMRVYIHV

SEQ ID NO: 55 - protein, 344 aa, Zea mays
MAGLSLQHPMAFAFGLLGNIISFMTYLAPLPTFCRIYRNKSTEGFQSVPYVVALFSAMLWIYYALLKSNEFLLITINSAGCVIETLYIATYLLYAPNKAKLFTAKILLLLNVGVFGLILLLTLLLSAGPHRVVVLGWVCVAFSVSVFVAPLSIIRQVVRTRSVEFMPFSLSFSLTASAVVWFLYGLLIKDKYVALPNVLGFTFGVVQMGMYALYRNATPRVPAAKEAAAAADDGNTFNFKAPGEHVVTIAKLTAAAPATAAELIIKARDDAQHPPEEEAAAAKAAPAKSKLLIPLPEHAYACMCIIRSGSHHKLGRACLLGTSTRPPACLPARMIQSSCYIRKG

SEQ ID NO: 56 - protein, 292 aa, Zea mays
MAGLSLLHPMAFAFGLLGNIISFMTYLAPLPTFYRIYKNKSTEGFQSVPYVVALFSAMLWIYYALLKSNELLLITINSAGCVIETLYIAMYLLYAPKKAKLFTAKILLLLNVGVFGLILLLTLLLSAGQRRVVVLGWVCVAFSVSVFVAPLSIIRQVVRTRSVEFMPFSLSLSLTVSAVVWFLYGLLIKDKYVALPNVIGFSFGVVQMGLYALYRNATPRVPAKDVADDASKDKAPGEHVVVTIAKLTAATTAPAAAVAEDLVKVHDGHPEEAAKGAAKPAENGAGRSDAEQ

SEQ ID NO: 57 - protein, 304 aa, Zea mays
MAFLNMEQQTWAFTFGILGNIVSLMVFLSPLPTFYRVYRNKSTEGFQSTPYVVTLFSCMLWILYALLKPGAELLVTINGVGCVVETVYLAMYLVYAPKAARVLAAKMLLGLNVAVFGLVALVTMLLSDAGLRVHVLGWICVSVSLSVFAAPLSIMRQVIRTKSVEFMPISLSFFLVLSAVVWFAYGALKKDVFVAFPNVLGFVFGLAQMALYMAYRKPAAALVIIPEQSKEEVAEGKASCGGAEVHPIDIAEVHDLQTVVVDVDVEPVTYAAASGMVDGSVGRPRAPEELVIKPDMVTVIAAEA

SEQ ID NO: 58 - protein, 333 aa, Zea mays
MAFLNMEQQTWAFTFGILGNIISLMVFLSPLPTFYRVYRKKSTEGFQSTPYVVTLFSCMLWIFYALLKSGAELLVTINGVGCVIEAAYLAAYLVYAPKAARALTAKMLLGLNVGVFGLAALATMVVSSAGLRVRVLGWICVSVALSVFAAPLSIMRQVVRTKSVEFMPISLSFFLVLSAVIWFAYGALKRDVFVAFPNVLGFVFGVAQIALYMAYRNKEPAAVTVEEAKLPEHAKEVVVAAAAAEARASCGAEVHPIDIDIEATPTPVEEVHEPQVVVVVDVDVEPVTCAGAAEAAAGAGADASGVADGGVPGPMAPPEQLAIKPDMAISVEA

SEQ ID NO: 59 - protein, 238 aa, Zea mays
MDSTLFIIGVIGNIISVLVFISPIKTFWRIVRSGSTEEFEPAPYVFTLLNALLWLYYGATKPDGLLVATVNGFGAAMEAIYVVLFIVYAANHATRVKTAKLAAALDIGGFGVVFVATTFAINELNMRIMVIGMICACLNVLMYGSPLAAMKTVITTKSVEFMPFFLSFFLFLNGGIWATYAVLDRDIFLGIPNGIGFILGTIQLIIYAIYMNSKVSQSSKEIASPLLASSQEEAASHV

SEQ ID NO: 60 - protein, 239 aa, Zea mays
MDSTLFIIGVIGNIISVLVFISPIKTFWRIVRGGTTEEFEPAPYVLTLLNALLWLYYGLTKPDGFLVATVNGFGAVMEAIYVVLFIVYAANHATRVKTAKLAAALDIGGFGVVFAATTFAISEFELRIMVIGMICACLNVLMYGSPLASMKTVITTKSVEFMPFFLSFFLFLNGGVWATYAVLDRDIFLGIPNGIGFVLGTIQLIVYAIYMNSKASQCSKETASSPLLASDRGEASSHV

SEQ ID NO: 61 - protein, 317 aa, Zea mays
MADPSFLVGIVGNVISILVFASPIATFRRIVRSRSTEDFRWLPYVTTLLSTSLWTFYGLLKPGGLLVVTVNGAGAALEAAYVALYLVYAPRETKAKMAKVVVAVNVAFLAAVVAVALLALHGGARLFAVGLLCAALTVGMYAAPLGAMRTVVKTRSVEYMPFSLSFFLFLNGGVWSIYSLLVKDYFIGVPNAIGLVLGTAQLLLYLAYRKAPASKDDDEEAAAAASGDDGDDEEEEEGLTHLMGQQVEMAQRGRLRLHKGQSLPKPPPGGPLSSPRHGFGSIIKSLSATPVELHSVLYQHARFQPVKKDDDDVEAND

SEQ ID NO: 62 - protein, 249 aa, Citrus sinensis
MDIAHFLFGVFGNATALFLFLAPTITFRRIVRRKSTEQFSGIPYVMTLLNCLLSAWYGLPFVSKNNILVSTINGTGSAIEIIYVLIFLLFAPKKEKAKIFGLFMLVLTVFAAVALVSLLAFHGNARKIFCGFAATIFSIIMYASPLSIMRMVIKTKSVEFMPFFLSLFVFLCGTSWFVFGLLGRDPFVAVPNGFGCGLGTMQLILYFIYHKKGEPEKPSAANGSVEMGQEKPLEGTKMANGNGALVEQV

SEQ ID NO: 63 - protein, 235 aa, Citrus sinensis
MILTVTYQALTVLKDAVGIAGNIFAFGLFVSPVPTFRRIIRNHSTEEFSGLPYVYALLNCLITMWYGTPLVSADNILVTTVNSIGAAFQLVYIILFITYTEKDKKVRMLGLLLAVIGIFSIIAAVSLQIVNPFSRQMFVGLLSCAALISMFASPLFIINLVIQTKSVEFMPFYLSLSTFLMSTSFLAYGIMNWDPFIYVPNGIGTILGIVQLALYFNYKETSGEESRDPLIVSYA

SEQ ID NO: 64 - protein, 264 aa, Citrus sinensis
MSSVGISSIYSGCSVAAGVTGNIFAFVLFVSPIPTFRRILRNKSTEQFSGLPYICSLLNCLITLWYGMPLVSPGIILVATVNSVGAVFQLIYVSIFISYAEKAIKLKISGLLIAVFLVFLAIVFTSMEVFDSNGRRLFVGYLSVASLISMFASPLFIIVSSSGTQAFRLLRLHISLHSYGCMYIFMQKLVIKTRSVEFMPFYLSLSNFLMSLSFLAYGMFKDDPFIYVPNGIGTLLGIAQVMLYSYYSTKSGEVSRQPLIDSFA

SEQ ID NO: 65 - protein, 249 aa, Citrus sinensis
MGDGLRLAFGVMGNAASLLLYATPILTFSRVIKKKSTEGFSCFPYIIALLNCLLYTWYALPVVSYRWENFTVVTINGLGIFLELSFILIYFLFASARDKIKVAAIVIPVILLFCITALVSAFVFHDHHHRKLFVGSIGLGASITMYSSPLVAVKQVIRTKSVEFMPFHLSFFSFLTSAIWMVYGLLSHDLFIASPSFVGGPLGILQLVLYWKYRKSGIIKEPNKWDLEKNGENSKKLQLAINNDINGKS

SEQ ID NO: 66 - protein, 205 aa, Citrus sinensis
MFWILYGLPVVHPDSTLVITINAVGLALELIYLSIFCFTNICFYFARRTCHLITCLILAYLQTVVGLGLLAEVIFVGVIAIITFLAFHTHTSRSMFVGILCDIFNIIMYASPLTIWHKVITTKSVEYMPFFLSLANFANGCIWTAYALIKLDIYILVSNGLGAILGFIQLVIYACYYKSTPKKGNDDDFVKPKPTEVQHSGAAMA

SEQ ID NO: 67 - protein, 240 aa, Citrus sinensis
MVSAEAARNIVGIIGNVISFGLFLSPTPTFWRIIKRKDTEEFHPYAYICACMNCMFWILYGLPVVHPDSTLVVTINGVGLALELIYLSIFCVYNRQKKGRKIVAIGLLGEVAFLGVIAVITFVVFHNTNTRTLFVGIICDIFNIIMYASPLSIWHKVIKTKSVEYMPFFLSLANFANGAVWTAYGLIKFDKFIVVSNGLGTVLGAIQLIIYGCYYKSTPKKGSGDVIKPNEVQLSGATIA

SEQ ID NO: 68 - protein, 93 aa, Citrus sinensis
PTFVKIFKKRSVEEFKPDPYLATIMNCSLWVFYGLPFVTPDSILVVTINSTGLAMEIAYITIFFVFAQKKGRRLLLRFLFLFLAKSFLFLKIF

SEQ ID NO: 69 - protein, 255 aa, Citrus sinensis
MVETGLIRTVVGIIGNVISLGLFLSPIPTMAAIVRQKSVENFKADPYIATVLNCFVWTFYGLPFVHPDSTLVVTINGAGAAIELFYVLIFVIFSSWGKRRKIFVALVVEVVFMAILIFVTLYFLHTTDDRTTVVGIIAVVFNIVMYAAPLTVMKMVISTKSVKYMPLALAIGNAANGAVWVVYACLRFDPYVLIPNGLGTLSGILQLTLYAIFYKTTNWDGDDDENRNDNNGNGNGNGSNNNRRGRGEVQLVDVA

SEQ ID NO: 70 - protein, 241 aa, Citrus sinensis
NIISLFLFLSPVPTFVEIVKKGTVEQYSAAPYLATLLNCMVWVLYGLPMVHPHSILVITINGSGTAIEVVYIILFVLHSDKKKRIKVMLVVLVEVIFVALVALLVLTLLHSTKQRSMAVGIICILFNIMMYASPLSVMKLVITTKSVEYMPFFLSLMSLANGIAWTTYAFLPFDQFIAIPNGLGTLLGVAQVILYACYYKSTKRQMAARQGKGQVDLSAVVVSESDSGDSKKIGTAVGGGG

SEQ ID NO: 71 - protein, 255 aa, Citrus sinensis
MGILTPHQLAFIFGLLGNIVSFLVFLAPVPTFLIIYKKKSSEGYHSIPYVIALSSATLLLYYGLLKSNAVLIITINSIGCVIEVIYLMLYLIYAPQKQKSFTIKLILVFNVGAFALMMVIVNFFVKGPNRVTAVGCVCAVYNVAVFSAPLSIMRRVIKTKSVEYMPFSLSFFLTLCATMWFFYGLFVKDMVIALPNVLGFLFGIAQMILYLVYKGKKGNESNQKQQECTEMKMNLTEDDKAYTKDNNQPTDLQTN

SEQ ID NO: 72 - protein, 243 aa, Citrus sinensis
NITSFLVCLAPMPTFYKIYKKKSTEGFQSVPYVISLFSAMIWIYYALLKQNAIFLMTINTFCCVMQTIYIAVYVFYAPKKVRIQTVKLLLLLNIFGFGAIREKILGYICMTFALSVFAAPLFIVRKVIKTKSVEYMPFTLSFFLTIGAVAWFFYGLLIKDLNVAIPNVLGFIFGVLQMILYVIYKNPNKKIVEQTKLQELSEHVVDVVKLSTMRHPGPRAAYALYTKQQTLLNNCILALQTCF

SEQ ID NO: 73 - protein, 275 aa, Citrus sinensis
MAILGPHSVIIFGLLGNIVSFLVYLAPLPTFYRIFKKKSTQGFQSIPYSVALFSAMLLLYYASLKGSNAFMLITINGIGCIIESLYLLFFMIYATKTAKIYTTKLLILFNIGALGLIVLLTYLLSKSSDQRLTIVGWICAVFSVCVFAAPLSIIRQVIRTKSVEYMPFSLSCCLTICAGMWLLYGLSIKDYYIATPNILGMAFGATQMILYLAYRTRRNSEILPVAAAVVDPKDREESNNTGAADPCCNHHHRHDSSNGEVEIKAVETNQINHTA

SEQ ID NO: 74 - protein, 322 aa, Citrus sinensis
MTMFSTHDPSVFAFGLLGILQIQKCHCLNIIFMLHAYVYVFVANIFICFHVTIIGNIVSFIVFLAPMPTFYRVCKKKSTEGFQSLPYVVALFSAMLWIYYAMMKKDAFLLITINAFGCVIETIYLALYITFAPKQARLYTLRLLLLLNFGGFGSILLLSHFLAKGSAARLRLLGWVCVVFSVSVFAAPLSIMRLVVRTKSVEFMPFYLSLFLTLNAVMWFFYGLFLKDVYVAVPNVLGFIFGVVQMILYAIYRNYRRVVVEDVNKVPEHTVDVVKLSTNNMTASEEQTNSRNNFDDKNEHEQANDQHEKARESCNQDPLNKC

SEQ ID NO: 75 - protein, 248 aa, Citrus sinensis
MLWFYYALVKQNAFLLVTINCFGCVIETIYIILFITYAPKGSRNSTVKLFVSMNVGVFSLILLLTHFLATDSTRILILGWICVAVSVSVFAAPLSIVAQVIRTKSVEFMPFILSFFLTLSAIMWFAYGLFQKDICVALPNIVGFLLGLTQMLLYVIYKNANKVIIEDKKLPEAQLKSIVVLSNLGASEVYPVDIHPDDADANDVNQGPKENRQETDQRNPKSLEVPGGLQLQQHNDNNNTDDGCAVAV

SEQ ID NO: 76 - protein, 308 aa, Citrus sinensis
MASLSFFVGIIGNVISLLVFASPIKTFWQIVKKKSTESYKGVPYITTLMSTCLWTFYGVMKPGGLVVATVNGAGAALQFIYVSLYLIYAPKDKKVKTAKLVAILDVGFLGAVIAITLLAMHGNLRLTFVGILCAALTIGMYASPLAVMTTVIRTKSVKYMPFLLSFFLFLNAGVWSVYSVLVKDIYIGVPNAVGFVLGAAQLILYMIYKNKTPLPTKSMDSVKERSAHKVKDGIEMGARGDDHDNQEDDLEEANGKKKRTLRQGKSLPKPTLGKQFSIPKILKKTASLGPYDLYSSWYHHYDDSDVDA

SEQ ID NO: 77 - protein, 114 aa, Citrus sinensis
MASLNFIFGLLGNLTTGLVYLSPAKTFWHIVQRRSTEEFESIPYISKLLNAYFWVWYGIVKPNSVLVASVNGFGAALEIIYVIIFLIFAPPMMRGRTAVLAGVCDVVFPGTTVL

SEQ ID NO: 78 - protein, 234 aa, Citrus sinensis
MKDLSFYVGVIGNIISVLMFLAPVRTFWRIIKHRSTEEFQSLPYICTLLNSSLWTYYGITRPGSYLVATVNGFGILVEAVYVTLFFIYAPTKAMRAKTAIIFGILDVGFLGAAIAATRLALEGEARIDAIGFMCAGLNIIMYASPLSAMKTVVTTKSVEFMPFMLSFFFFLNGGIWAFYALLVRDIFLGVPNGTGFLLGTAQLVLYAIYRNAKPSKNAANSMEEGAQHEPLIIS

SEQ ID NO: 79 - protein, 236 aa, Medicago truncatula
MSVFASLAICKVAKDAAGVAGNIFAFGLFVSPIPTFRRIIRNGSTEMFSGLPYIYSLMNCLICMWYGTPLISHDNILVTTVNSIGAVFQFVYIILFMMSAEKEKKVKMLAWLMGVLGIFAIILIGSLQIDDIVMRRLFVGILSCASLISMFASPLFIIKLVIQTKSVEFMPFYLSLSTFLMSTSFLVYGLLSDDIFIYVPNGIGTILGMTQLILYFYYESKSRRMDAEEPLIVSYA

SEQ ID NO: 80 - protein, 256 aa, Medicago truncatula
MAETLRLAVAVIGNVASVSLYAAPIVTFKRVIRKKSTEEFSCIPYTIGLLNCLLFTWYGLPIVSNKWENFPLVTVNGVGIVLELAYVLIYFWYSSSKGKVKVAMIAIPILLVFCAIALASAFAFPDHSHRKQLVGSVGLGVSIAMYASPLVVMKKVIQTKSVEFMPLPLSLCSFLASVLWLTYGLLIRDIFVAGPSVIGTPLGILQLVLHCKYWKRKVVIEEPNKVDLPKLVSLENLDLEKGGLEKGNLEKNVTTS

SEQ ID NO: 81 - protein, 244 aa, Medicago truncatula
MDIAHFIFGVFGNAFGLFLFLAPIITFKRIIVNKSTEKFSGVPYPMTLLNCLLSAWYGLPFVSPDNILVTIINGTGAVIEIIYVFIFIVFAPKKEKLKISGLFAFVITVFAAVVFISLFALHGNSRKVFCGFAAAIFSIIMYGSPLSIMRLVIKTKSVEFMPFFLSLFVFLCGTSWFIFGLLGRDPFIFVPNGVGSFLGTLQLILYFIYRGNKGNAKTPTTKEEAMEMGTAKPMGEGELKGDTT

SEQ ID NO: 82 - protein, 288 aa, Medicago truncatula
MAMISMNHHFLVIAFGLLGNIISCMVYLAPLPTFIQIYKKKSTECFQSLPYLVALFSSMLWLYYGIQTNAIFIVSINAFGCVIEIIYCIMYIAYATKDARKLTIKLCAALNVVSFVLIFLIIQFSIPENHRVQVLGWICTSISISVFAAPLSIVVRVVKTKSVEFMPFNLSLFLTLSAVVWFLYGFVKRDICIYLPNVVGFILGIIQMVLYGYYSKYSVEKEKEQAVINIVVVNPLGSSEVFPIPLDENKESIEDVINQQFQVKKVGEEDAKEKHDNNVEAIEFQCVV

SEQ ID NO: 83 - protein, 263 aa, Medicago truncatula
MSTAEIARTAVGIIGNVIAGCMFLSPVPTFVGICKKGSVEQYSPVPYLATLMNCMVWTLYGLPMVHPHSFLVVTINGAGCVVEIIYITLFLIYSDRKKRLKVFLGLLLELIFIFLLSFVSLTMLHTVNKRSAVVGTICMLFNIGMYASPLSIMKLVIKTKSVEFMPFFLSLASFGNGVSWTIYALIPFDPFIAIPNGIGTMFAVVQLILYASYYKSTQEQIAARKNNGKGEMNLSEVVVGMSNATVQDNKKITAIDHSSPSAK

SEQ ID NO: 84 - protein, 247 aa, Medicago truncatula
MHVAHLLFGIFGNASALFLFLAPVITFKRIIVNKSTEKFSGLPYVMTLLNCLLSAWYGLPFVSPNNIPVTTVNGTGAGIEIIYVLIFIIFAPKKEKIKIFALFTLVLSVFSAVVFVSLFAFHGNHRKAFCGFAMAIFSVIMYGSPLSIMRLVIKTKSVEFMPFFLSLFVFLCGSSWFIFGLLGRDLFVAVPNGLGSVLGTMQLILYFIYRDNKGSPKQQEPTEGESMEMGNGKNHQMKQSYENEIQG

SEQ ID NO: 85 - protein, 250 aa, Medicago truncatula
MSETLRLAVAVLGNAASVSLYAAPMVTFKRVIRKKSTEEFSCIPYIIGLLNCLLFTWYGLPIVSYKWENFPLVTVNGVGIALELSYVLIYFWYSSPKGKVKVAMIMTPVLLVFCIVAAVSAFSFHDTAHRKLLVGSIGLGVSVALYGSPLVAMKKVIETKSVEFMPLPLSLCAFSASACWLVYGILVRDVFVAGPSVVGTPLSILQLVVYFKYRKARVVEEQKIGDLEKGSIELEKVVKVEKIVTNCEQC

SEQ ID NO: 86 - protein, 250 aa, Medicago truncatula
MSNTLRLAVAVLGNAASVSLYAAPMVTFKRVIRKKSTEEFSCIPYIIGLLNCLLFTWYGLPIVSYKWENFPLVTVNGVGIALELSYVLIYFWYSSPKGKVKVAMITTPVLLVFCITVAVSTFFLHDTTHRKLLVGSIGLVVSVALYGSPLVAMKKVIQTKSVEFMPLPLSLCAFSASVFWLAYGILVRDVFVAGPSLVGTPLSILQLVIYFKYRKERVMEESKIGDLEKGSIELEKVVKVEKIVTNCEQC

SEQ ID NO: 87 - protein, 311 aa, Medicago truncatula
MSSHHSHLSFAFGVLGNISSFVCFLAPLPTFYRICKKKSTEGFQSIPYVAALFSAMLWMFYAYTKKGETLLITINAFGCVIETIYLAVFVTYCPKKVRMSTLRMIVLMNFVGFGTIVLLTHFLAKQEEGRIKLLGWICVVFATSVFAAPLSIIRVVIRTKSVEFLPFPLSVLLLISAVMWLLYGLSLRDIYVTLPNVVGLTFGIVQITLYAMYRNSKPVIDEKLPEHKGDIVDKEIENVVVPSKTTNDEKKLEVSVVDMVIVEKKEEKQDEEHDEKEKKQDQVTQDKTKVKNENDNININKTEEKDSGCEV

SEQ ID NO: 88 - protein, 270 aa, Medicago truncatula
MALFYSEYWAFVFGVIGNVISCMTFLAPLPTFYRIYKKKSTEGFQSVPYVTALLSAMLWIYYAHVKNKATLLLLTINIYGFGIEAIYIIIFLLYASNKARLSTIKLLFLTVCGYGTMVILTTYLTKGSKRLSIIGWICMVFNICVFASPLFILKQVIKTKSVAFMPLNLSFFLTLNAIVWFFYGLLIDDFYIAIPNTLGFVFGIVQMVIYLIYKDAIPLESTKLQKPNDHVLNICEDVPNGALQPDPNQVVKSGAPAVAVIGDEDPNNGK

SEQ ID NO: 89 - protein, 238 aa, Medicago truncatula
MARMQVRRSALHTCCGQELKHHPNLDKCPNTYLWPTFIKICKAKSVQDFKPDPYVVTILNCAMWSFYGMPFISKSNTLVLTINGFGFFIEIIYTSIFFVYSNGSKRKKILLALLAEVVFLVLVVFIVMYFVTNLKERRFIVGVICIIFNILMYFSPLTVMRQVIRSKSVKYMPFLLSLANFANGLIWTTYALLRWDPFVVIPNGLGALSGLAQLILYAVYYRTTKWDDDAPPSSVNNV

SEQ ID NO: 90 - protein, 269 aa, Medicago truncatula
MDPHDHDRLAFIFGILGNIISSMVYLAPLPTFYRIWKKKSTEGFQSLPYLVALFSSMLWLYYGFVKKHAFLLITINSAGCVIETIYIVTYLIYATKDARILTIKLFMAMNVACSVLIVLTTQLAMHGKLRVHVLGWICTSFAICVFAAPLTIMAKVIRTKSVEFMPINLSFFLTLSAIVWFFYGLLLHDICIAIPNVLGFILGLLQMLLYAIYNKSVKEEYALEPMTNIVIVNPLGIPCEVFSLPVIDNVNKIEKEGAEEMEKSVENLT

SEQ ID NO: 91 - protein, 252 aa, Medicago truncatula
MFPFSNLKMVLLFGFLGIVTFMSFLAPLPTFYSIYKKKSSEGFHSIPYVVTLLSTLLFVYYGFLKTNAIFLITINSIGCVMEVAYLIMYITYAPKKLKISTLVLILIVDMGGFGLTMIITTFIVKGSFHVQVVGMICTIFNIGMFAAPLSIMKKVIKTRSVEYMPFPLSLFLTICATMWFFYGFFDKDKYIMLPNGLGFLLGVSQMILYLIYKNAKNNVEASSTNQLQEHGCDGGNNQIFPTVVEMKEINIV

SEQ ID NO: 92 - protein, 240 aa, Medicago truncatula
MVNALIVRDVVGLIGNVIYFGLLLSPIPTLVKIIKKRDVEEFKSDTYIAIVLNCAFWVFHGLPFVHPDRILVVANVIGLNFSFDIINVIGLVLGFFYITIFYICANNEGRELLINKAFFFGFVVLVTMFTLDDTNKRSLVVGIIFNFLNVIMYVSPLAVMENVIKTKSVKYMPFLPSLAIFLNGLCWTTYALINPFDIYLLVSNGIGAISGFVQLILYVYFWCKGENKNDDANHDSDSAV

SEQ ID NO: 93 - protein, 233 aa, Medicago truncatula
MVNLRTIVGIIGNVISFGLFFAPGPTFYTIIKKKDVEEFKSHPYLATLLNCAFWVFYGMPFVHPNSLLVVTINGVGLVFMIVYLTIYFIYANKKGRKDMGFWLLLEAIFFAAIVLITMLVFHGTTGRSLIVGIVCDVFNILMYISPLTIMKKVITTKSVKYMPFWLSVFNFLNGLCWTTYALLHPFDLYVLISNGIGVISGTVQLILYGYYWCRGDNQIDDDKGGPAPVVTAV

SEQ ID NO: 94 - protein, 235 aa, Medicago truncatula
MVNQSAIRTVVGIIGNVISFGLFFSPAPTFYKIIKKKDVEEFKPDPYLATLLNCAFWVFYGMPFVHPNSLLVVTINGVGLVFEVVYLTIFFIYANKKGRKKLLLYLLIEAAFFAIIVLITMLALHGTTKRSLIVGIICDIFNILMYASPLTIMATVIRTKSVKYMPFWLSLTNFLNGLCWTTYALLHPFDIYVLISNGIGVISGTIQLILYGYYWCRGDNQIGDDKNDAPAVTVV

SEQ ID NO: 95 - protein, 248 aa, Medicago truncatula
MVVTAKLARNVVGAIGNVISFGLFFSPAPTFYGIIKKKSVEEFKPDPYLATLLNCAFWVFYGMPFVHPNSTLVLSINSVGILFEVVYLTIFFIYATKSGRKKLLLYLLIEAIFFAVIVLITMLALHGTKKRSLIVGVLCDVFNVMMYASPLTIMAKVIKTKSVKYMPFWLSLTNFLNGLCWTTYALIHPLDIYVLVSNGIGVVSGIVQLILYACYFSRKGEEDDDGDGDFELKPTGVRDISSNGRATA

SEQ ID NO: 96 - protein, 111 aa, Medicago truncatula
MGVLGIFAIILIGSLQIDDIVMRRLFVGILSCASLISVFASPLFIIKLVNQTKSVQFMSLYLSLFTFLMSTSFLVCGLLSDDVPNGIGTLLGMTGKSRRLDAEESLIVSYG

SEQ ID NO: 97 - protein, 253 aa, Medicago truncatula
MFSFSDHEMVLIFGLLGNIVSFMVFLAPLPTFYSIYKKKSSEGYQSIPYVVALLSALLLLYYGFLKTNAILIITINCIGCVIEVAYLIMYIIYAPKKLKISTLVFILVADLGGFGLTMIITFFVVKSSFRVHAVGLICAIFNIAVFAAPLSIMRKVIRTRSVEYMPFSLSLFLTLCATMWFFYGLFDKDNYIMLPNVLGFLFGVSQMILYLIYKNAKNKVETNSTEEQEHGCDDGNKQDFPSVVVVEMKENIV

SEQ ID NO: 98 - protein, 279 aa, Medicago truncatula
MAISHNTLAFAFGMLGNVISFMVFLAPMTTFYRIYKKKSTEGFQSLPYLVALFSSMLWLYYAFLKKDEFLLITINSFGCVVELIYIILYIIYATKDARKLTIKLLLAMNIGSFGLILLVTKYAVHGPIRVQVLGWICVSISVSVFAAPLTIVAQVVRTKSVEFMPFNLSFTLTLSAIMWFGYGLFLKDICIALPNVLGFALGLVQMILYCIYRNGDKKKANSKAALKSVVIESSLGGTGEVFQVEKNDGEEEEEKKKTIEETEYDSKLRYLFTFSTRVP

SEQ ID NO: 99 - protein, 268 aa, Medicago truncatula
MAISHNTLAFTFGMLGNVISFLVFLAPISTFYRIYKKKSTEGFQSLPYLVALFSSMLWLYYALLKKDAFLLITINSFGCVVETIYIILYIIYAPRDARNLTFKLLSAMNVGSFALILIVTNYAVHGPLRVQVLGWVCVSLSVSVFAAPLSIVAQVVRTKSVEFMPFNLSFTLTLSATMWFGYGLFLKDICIALPNVLGFVLGLLQMLLYAIYRNGGEKAMKKEKKAPIEPPKSIVIETQLEKIEQEKKNKDDDNEEKDKSEEPIGCGV

SEQ ID NO: 100 - protein, 235 aa, Medicago truncatula
MSLFNAYSICEIGKDAAGIAGNIFAFGLFVSPIPTFRRIMRNGSTELFSGLPYIYSLLNCLICLWYGTPLISCDNLLVTTVNSIGAAFQLVYIFLFLIYAEKPKKVRMFGLLLAVLGIFVIILVGSLKITDSSIRRILVGCLSCASLISMFASPLFIIKLVIRTKSVEFMPFYLSFSTFLMSISFFLYGLLSDDAFIYVPNGIGTVLGMIQLILYFYYKRSSSDDSTEPLIVSYG

SEQ ID NO: 101 - protein, 278 aa, Medicago truncatula
MVHRDNTAIFVVGILGNIASFFCFIAPVSIFYQVCKKKTTGGFQSAPYVAALFSAMLWIFYAYIKTGEMLIITINAFGCVIETIYLVIYTTYCSKKARIFTLKLIGLFNLGGICLVIILTHVLAKERTERIELLGWICVVLSTSVFAAPLSVMRVVIRTKSVEFMPFTLSLLLTTSAIIWLCYGILLKDIFVTLPNFVGITFGTIQMVLYAIYRKNKPVNDQKLPEHKDDMNENQLQVVVIPLQNVVDIETTMENKEEKKQEETKPSEGNQVQQQKEG

SEQ ID NO: 102 - protein, 255 aa, Medicago truncatula
MAMTRESWAFVFGIIGNIISFAVFLSPLPTFYVIFKKKSAEGFQALPYVVALFSAMLWIYYAFVKRESALLLITINTFGIVVESAYIIMFLIYAPKKQRLSTIKLLLLLNVFGFGAMLLSTLYLSKGAKRLAIIGWICLVFNISVFAAPLFVISKVIRSRSVEYMPFFLSFFLTINAVMWFFYGLLLRDYYVALPNTLGFVFGIIQMVVYLIYRNATPVVEAPMKGQELSGGHIIDVVKIGTDPNRAGGGAGSKV

SEQ ID NO: 103 - protein, 256 aa, Medicago truncatula
MGEELGDIMTAAAAHIARTIIGVIGNIISGFLFLSPVPTFIAIWKKGSVEQFSPAPYLATLVNCMVWTLYGLPMVHPDSVLVVTINGSGCVIEIIYVTLFLIYSDGNKRLKVLMWLVVELVFIAALTFVTLSLVHDVAKRSAIVGTTCIVFNIMMYVAPLAVMKLVIMTKSIEYMPLSISLASFGNGVAWTTYSLLPFDKFITIPNGIGTLFSVAQLILYATYYKSTKMQIAARKANKIEVDLSQVVVANGNKQSK

SEQ ID NO: 104 - protein, 246 aa, Medicago truncatula
MADPSFFVGVIGNIISILMFLSPVPTFWRMIKKKSTEEFSSFPYICTLLNSSLWTYYGTIKAGEYLVATVNGFGIVVETIYILLFLIYAPPKMRVKTAILAGILDVLILVAAVVTTQLALGGEARSGAVGIMGAALNILMYGSPLAVMKTVVKTKSVEYLPFLLSFFFFLNGGVWLLYAVLVRDSILGVPNGTGFVLGAIQLVLHGIYRNGKQSKHVSNKLEEGWQHEHLISSSTTRSHDRENLPI

SEQ ID NO: 105 - protein, 231 aa, Triticum aestivum
MDSLSLYEISCFAAGFAGNLFAFALFLSPVPTFKRILKAKSTEQFDGLPYLLSLLNCFICLWYGLPWVSDGRLLVATVNGTGAAFQLAYISLFFIYADSRKTRLRMVGLLVLLVCAFALVAHASIAFFDQPTRQQFVGAVSMASLISMFASPLAVMGVVIRTECVEFMPFYLSLSTLLMSASFAVYGLLLRDLFIYLPNGLGVVLGATHLALYAYYSRKWRCKDSSAPLLA

SEQ ID NO: 106 - protein, 289 aa, Triticum aestivum
MAGLSMEHPWAFAFGLLGNIISFTSLLAPIPTFYRIFKSKSTEGFQSVPYVVALFSAMLWIFYALVKTGEGLLITINAAGCVIETVYIIMYLVYAPRKAKIFTAKIVLLLNVAGFGLIFLLTLFAFHGETRVVSLGWICVGFSVCVFVAPLSIIGRVIKTKSVEYMPFSLSLTLTLSAVVWFLYGLLIKDKYVALPNILGFTFGMIQMVLYMFYMNATPVVASDAKEGKEAWKVPAEDHVVVINVGKADKSSCAEVRPVADVPRRCAAEAAAPGQQVMAVDFARSVEVV

SEQ ID NO: 107 - protein, 247 aa, Glycine max
MDVAHFLFGIFGNASALFLFLAPVITFKRIIKNRSTEKFSGIPYVMTLLNCLLSAWYGLPFVSPHNILVSTVNGTGSFIEIIYVLIFIVLAPRKEKAKILGLFTFVLSVFSAVVFVSLFALHGNSRKLFCGFAAAIFSIIMYGSPLSIMRLVIKTKSVEFMPFFLSLFVFLCGTSWFIFGLLGRDPFVAVPNGVGSALGTMQLILYFIYRDNKGVPRKQAPTEEESMEMGDAKPQQGKQSNANGIQG

SEQ ID NO: 108 - protein, 235 aa, Glycine max
MSLFAAFSICKVAKDAAGVAGNVFAFGLFVSPIPTFRRIIRNGSTEMFSGLPYIYSLLNCLICMWYGTPLISADNLLVTTVNSIGAVFQFVYTIIFLMYAEKAKKVRMVGLLLAVLGMFAIVLVGSLQIDDVIMRRFFVGFLSCASLISMFASPLFIIKLVIQTKSVEFMPFYLSLSTFLMSTSFLLYGLFNDDAFIYVPNGIGTILGMIQLILYFYFESKSRESSREPLIVSYA

SEQ ID NO: 109 - protein, 254 aa, Glycine max
MAETLRMVVAVIGNVASVSLYAAPTVTFKRVIRKKSTEEFSCMPYIIALLNCLLFTWYGLPVVSNKWENLPLVTVNGVGILFELSYVLIYIWFSTPKGKVKVAMTAVPVLIVFCVIAIVSAFVFPDHRHRKLLVGSIGLGVSIAMYGSPLVVMKKVIQTKSVEFMPLPLSFCSFLASVLWLTYGLLIRDIFVAGPSLIGTPLGILQLVLHCKYWKRRVMEEPNKVELQKGNNTEKLDLEMGHGKECVTVPSNCN

SEQ ID NO: 110 - protein, 254 aa, Glycine max
MAETIRLAVAVLGNAASVALYAAPMVTFRRVIRKKSTEEFSCFPYIIGLLNCLLFTWYGLPVVSYKWENFPLVTVNGVGIVLELSYVLIYFWYASAKGKVKVAMTAIPVLLVLSIIAAVSAFAFHDNHHRKLLVGSIGLGVSVTMYGSPLIVMKKVIQTKSVEFMPLPLSMCSFLATVFWLIYGLFIRDIFVAGPSAVGTPLGILQLVLYCKYRKGSVVEDPSKGDLEKGNLEKVEMEIGKVEMNVTNHMNGHS

SEQ ID NO: 111 - protein, 262 aa, Glycine max
MVSISDHELVLIFGLLGNIVSFMVFLAPLPTFYTIYKKKSSEGFQSIPYAVALLSALLLLYYGFIKTNATLIITINCIGCVIEVSYLTMYIIYAPRKQKISTLVMILIADIGGFGLTMLITTFAVKGINRVHAVGWICAIFNIAVFAAPLSIMRRVIKTKSVEFMPFSLSLFLTLCATMWFFYGFFDKDDFIMFPNVLGFIFGISQMILYMIYKNSKKNGETNCTEQQESEGTVNSKQHSCDGNKLDFPSLVEMKENQLNQV

SEQ ID NO: 112 - protein, 262 aa, Glycine max
MVLFSDHELVLIFGLLGNIVSFMVFLAPWPTFYTIYKNKSSEGFQSIPYVVALLSALLLLYYGFIKTNATLIITINCIGCVIEVSYLAMYIIYAPRKQKISTLVMILIADIGGFGLTMLITTFAVKGINRVHAVGWICAIFNIAVFAAPLSIMRRVIKTKSVEFMPFSLSLFLTLCATMWFFYGFFDKDNFIMLPNVLGFLFGISQMILYMIYKNAKKNGEINCTEQQERDGTVNSKQHSCNGNKLDFSSLVEMKENQLNQV

SEQ ID NO: 113 - protein, 260 aa, Glycine max
MAINHETWAFVFGLLGNVISFMVFLAPLPTFYQIYKKKSTEEFQSLPYVVALFSSMLWIYYALVKKDASLLLITINSFGCVIETIYLAIFLIYAPSKTRLWTIKLLLMLNVFGFGAMLLSTLYLTTGSKRLTVIGWICLVFNISVFAAPLCIIKRVIKTKSVEFMPFSLSFFLTINAVMWFFYGLLLKDYYVALPNTLGFLFSIIQMVLYLIYRNAKTPDLPMKLQELNSHTIDVGKLSRMEPSEPNHVTKNGTLTEREI

SEQ ID NO: 114 - protein, 258 aa, Glycine max
MAISHETWAFIFGLLGNVISFMVFLAPLPTFYQIYKKKSSEGFQSLPYVVALFSSMLWIYYALVKKDASLLLITINSFGCVIETIYLAIFLVYAPSKTRLWTIKLLLMLNVFGFGGMLLSTLYLTTGSKRLSVIGWICLVFNISVFAAPLCIMKRVIKTRSVEFMPFSLSLSLTINAVMWFFYGLLLKDYYIALPNTLGFLFGIIQMVLYLVYRNAKPQTLEEPTKVQELNGHIIDVVKPNHATKNGHVPVIEIASSV

SEQ ID NO: 115 - protein, 254 aa, Glycine max
MTMHRESWAFVFGVMGNIISFGVFLAPLPTFYQIYKKKSTEGFQSLPYVVALFSAMLWIYYAFVKRETALLLITINTFGIVVESIYLSIFLIYAPRKPRLTTIKLLLLLNVFGFGAMLLSTLYLSKGAKRLAIIGWICLVFNISVFAAPLFIIRRVIKTRSVEYMPFTLSMFLTINAVMWFFYGLLLRDYYVALPNTLGFVFGIIQMVMYLMYRNATPVALEEPVKAQELNGHIIDVVKIGTMEPNHGGAVGKV

SEQ ID NO: 116 - protein, 294 aa, Glycine max
MAHANPMIFVVGILGNLVSFCCFLAPVPTFYRVCKKKTTEGFQSLPYVAALFTSMLWIFYAYIKTGEILLITINAFGCFIETVYLVIYITYCPKKARFFTFKMIFLFNVGVIFLVVLLTHVLAKERTARIELLGWICVVLSTSVFAAPLSIIKVVIRTKSVEFMPITLSLLLTVSAMMWMAYGILLRDIYVTLPNFVGITFGTIQIVLYLIYRKNKPVKDQKLSEHKDDVANDENVNTAVSGENRGANATGFVDIEIGEKKQVQEQADKKQDQQAVNARDQTEHNNNSNKTREG

SEQ ID NO: 117 - protein, 309 aa, Glycine max
MSHSHLSFAFGILGNIASFVCFLAPLPTFYRVCKKKSTEGFQSIPYVAALFSAMLWIFYAYVKTGETLLITINAFGCVIETIYLAVFITYCPKKARMSTLRMIVLLNFGGFCTIVLLTHLLAKGEEARVKLLGWICVVFATSVFAAPLSIIRVVIRTKSVEFLPFPLSLLLLISAIMWLLYGISLKDIYVTLPNVVGLTFGVIQIGLYAMYRNNKPIKDQKLPEHKGDIVESENVIAPTGNGEKQEEEVKPQGGDIEIGEKKEENNKQDQQQSVENKKLDQVAHDQTELNKNNINKNNNKTEERVSCEV

SEQ ID NO: 118 - protein, 271 aa, Glycine max
MVISHHTLAFTFGMLGNLISFLVFLAPVPTFYRIYKKKSTESFQSLPYLVALFSSMLWLYYAMLKRDAVLLITINSFGCVIEIIYIVLYITYATRDARNLTIKLFSAMNMSSFALILLVTHFAVHGPLRVQVLGWICVSISVSVFAAPLSIVAQVVRTKSVEFMPFNLSFTLTLSAIMWFGYGLFLKDICIALPNVLGFVLGLLQMLLYTIYRKGNKKTKTNEKSPVEPLKSIAVVNPLGTGEVFPVEEDEQAAKKSQGDGDDKKGQDCLV

SEQ ID NO: 119 - protein, 283 aa, Glycine max
MAIFNGHNHLALGFGMLGNVISFMVYLAPLPTFYRIYKKKSTEGFQSLPYLVALFSSMLWLYYASLKPADATLLITINSLGCVIEIVYIIMFTIYATKDARNLTVKLFMVMNVGSFALIFLVTYFAMHGSLRVQVVGWVCVSIAVGVFAAPLSIVAQVIRTKNVEFMPFNLSLFLTISAVMWFFYGLLLKDICIAIPNILGFTLGLLQMLLYAIYRNGKTNNKEVVTKEEHALEAMKNVVVVNPLGTCEVYPVIGKEINNNGQGIEGAEEKEKGVELGKECPV

SEQ ID NO: 120 - protein, 248 aa, Populus trichocarpa
MDVLHFLFGVFGNATALFLFLAPTITFKRIIRSKSIEQFSGIPYVMTLLNCLLSAWYGLPFVSKNNVLVSTINGAGSAIETIYVLIFIIYAPKKEKAKVLGLLTLVITIFTGVALVSLFALHGNARKLFCGCAAAVFSIIMYGSPLSIMRTVIKTKSVEYMPFFLSLFVFLCGTSWFVYGLLGRDPFVAVPNGVGCGLGALQLILYFIYRNNKGEAKKPISTHSLEIGPGKVHQEKKLVANGSHDERV

SEQ ID NO: 121 - protein, 293 aa, Populus trichocarpa
MAKISFFIGIVGNIISLLVFTSPIKTFWKVVKRKSTENYKGAPYITTLLSTSLWAFYGLLKPDILVVTVNGAGAIFQLTYVTLFLMYAPKDKKIKTAKLVAILNAGFLGVVIAITLLAMHGSLQTTFVGVLCAALTIGMYAAPLSAMKRVMRTKSVQYMPFFLSFFLFLNGGVWSVYAVLVKDYYIGVPNVVGFVLGSAQLILYIIYRNKSAAMIEEKGPVHIEAKEGVEMPAKGDNDEEAGNLKSRSLAEGKAKSLPKPSVERQHSLQKLTKTLSIGAYELLQHSSWANDAV

SEQ ID NO: 122 - protein, 238 aa, Populus trichocarpa
MLLRTGNIISVLLFLSPVGVFRRILKHRSTEEFESLPYICTLLNSSLWTYYGIIKTGEFLVATINGFGVVVEIVLLTLFLVFAPPRIRAKTAMLIGILDVGFLAAAILVCQLLLQGDMKIDIIGFLGAGLNVVMYGSPLAAMKTVVRTKSVEYMPFLLSLFVFLNGGVWTCYAVLKKDWFLGVANVAGFFLGAAQLILYAIYWKPKSSKNTASKDSEHGSQHEHLLPSSSHFRENNEA

SEQ ID NO: 123 - protein, 302 aa, Populus trichocarpa
MASLSFFVGIMGNIISLLLFVSPIKTFWGVVKKKSTENYKGVPYITTLLSTSLWTFYGLIKPDILVVSVNGVGAIFQFIYVTLFLIYAPKDTKVTMAKFVAILNVGFLGAVIMVALLAIHGNLRITFVGILCAALTIGMYAAPLSAMRRVIKTKSVEYMPFLLSFFLFLNGGVWSAYSVLVKDFYIGVPNVVGFVLGSAQLILYLMYKNKSASAKTMKAIEEDGSVQLVKGSVDILVHRDKDDEDDGGIDEGNLKNRSLSKGKSLPKPSVLNREYSYTKDHEDTLSDWANEAGIENGKLDNP

SEQ ID NO: 124 - protein, 239 aa, Populus trichocarpa
MFSIITLFGILGNITTGLVYLSPAKTFWRIARNRSTEEFESIPYICKLLNAYQWVYYGIIKPNSVLVATINGFGAVVELVFIVIFLMFASTQKIRVRTAILFGVLDLVFPAVSFLLMQLILHGQLRIDISGMFCVVFSMITYGSPLSAMKTVVATKSVEYMPFLLSFFLFINGGVWTVYAFLTEDYFIGIPNGTGFLLGTAQLILYVTYMKPKSSEKISDNLEDGSKHEPLIPSSNLVS

SEQ ID NO: 125 - protein, 273 aa, Populus trichocarpa
MTGNIISTMVYLAPVPTFIRIFKKKSTEDFQSLPYLMALFSSMLWLYYAMLKKDTILLVTINSFGCVIETTYIAIYIVYATRESRVSTIKLLISMNLGLFSLILLLAHFLVSGSVRVKVLGWLCVALSVCVFAAPLNILKQVIRTKSVEFMPFTLSFFLTLSAVMWFAYGLLLKDLCIALPNILGFILGLLQMLLYGIYRNAQKVEEKKKLPAENLKSIVILSAVGGPEVYPVDAKPDVNGGAEEHDQTEESKEDEKSMEASQDKLQSNECAV

SEQ ID NO: 126 - protein, 255 aa, Populus trichocarpa
MVSADLVRTVVGIIGNVISLLLFFSPVPTFVQIWRKKSVEQFSPAPYLATMINCMVWVLYGLPIVHPNSTLVWTINGTGVAIEMVYLLLFLIYSDKKGRFKVLQILLVEVVSIALLATLVLTLVHTTKKRTAIVGIVAIVFNTMMYASPLSVMKIVITTKSVEYMPFYVSLASFANSVAWSAYAFIKFDPFILAPNGTGALFAVAQLILYAVYYRSTQRQIAARQAKGDVGLSELVVNGSSRKTNSSRNGHGSEG

SEQ ID NO: 127 - protein, 235 aa, Populus trichocarpa
MSDSIPNPVWTTCKDAAGIAGNIFAFGLFVSPIPTYRRIIRNRSTEQFSGLPYIYALMNCLICMWYGTPLVSADNLLLVTVNSFGAVFQLAYIILFTIYAERRIKVRTLASLLVVLGLFAIIAVGSLQITDRMIRWLSVGSLTVVSLISMFASPLFIINLVIRTKSVEFMPFYLSLSTFLMSTSFMLYGLLNFDAFVYVPNGIGAILGIIQLALYVHYKKKSTQDSIEPLIASHA

SEQ ID NO: 128 - protein, 212 aa, Populus trichocarpa
MGDTLRLAVGVMGNAASLFLFSAPILTFCRVIRKKSTEEFSCVPYTIALLNCLLYTWYGLPMKVAITVIPVILVFCITAAISLFSFHDHHHRKIFVGSVALVASVVMYGSPLVVVKQVIKTKSVEYMPFNLSFFSFLSSSLWMVYGLLSHDPFLTFPNLVGIPLGILQLVLYCKYRKRGIKEESHKWDLEIRNEEKSKQLQLVINDSNNDKS

SEQ ID NO: 129 - protein, 283 aa, Populus trichocarpa
MALHLTWVFGFGLLGNFISCLVCLAPLPTFYRICKKKTSQGFHSIPYVIALFSAMLWLFYALFKEDALLLITINSFTFFMEIGYIFMYLLYATKKDKILTFKLLLLFNVFGFGLICVLTRFLTQRQKRVQVLGWICMTFSLCVFVAPLFIVRKVIRTKSVEFMPFSLSFFLTLSAVMWFFYGFLKKDQFVAVPNILGLLFGILQMVLYMIYRNSKKVVVVEPKLKLDISEHVVDLEKLGAAICSEIAIGIPKLNDGGDGIIEDQNAKEQTKKIMKAMDVTNKL

SEQ ID NO: 130 - protein, 237 aa, Populus trichocarpa
MTDTGTVRTIVGIVGNVISFLLFLSPIPTFVRIIKEKAVKDFKSDPYVATLLNCAMWIFYGLPFITHDNTLVVTINGIGFVIECIYVAIFFIFSPGKKKTRIIIELLIEVIFMVIVILITVFAFHTMKTRALFIGILCIIFNVFMYSSPLTVMRMVIKTKSVKYMPFYLSLANFTNGLIWVIYGLLDFDINLVLPNGLGALSGLIQLILYGIYCRSTKSDDDDDVSGNRSVVELSST

SEQ ID NO: 131 - protein, 349 aa, Populus trichocarpa
MLVGICSPFKANSFKCFAKLLWKYSWYLLDVDCIPRVSLEKHNCLREFRETDLNIDLNFLISCGREMALHLTWMLAFGLLGNLISCLVCLAPLPTFYQIYKKKTSEGFQSIPYVIALFSAMLWLFYAIFSEDAILLITINTFAFFMEFGYITVYLLYATKKDKILTFKLLLLFNSFGFGLICVLTLFLTQGQKRVQVLGWICMIFSLCVFVAPLFIVREVIKTKSVEFMPFSLSFFLTLSAVMWFFYGYLKKDQFVAVPNILGFLFGIIQMVLYVIYRNPMKILVVEPKLQELSHEHIVDIRKLGTAICSEINIVIPQLNDSGKVVFEDQIAKELTKQTQEITNATNKI

SEQ ID NO: 132 - protein, 276 aa, Populus trichocarpa
MASFSIHCPWIFTFGLLGNFVSFVVFLAPIPTFLRICRKKTTEGFQSLPYVVALFSAMIWLYYASLKSDVLLLITINSVGCFIEMIYIALYVAYAPKQARIATLRILILFNFGGFCSILLLSHFFVKGSNRVKVLGWACVIFSVSVFAAPLNIMRIVIRTKSVEFMPFTLSFFLTLSAITWLVYGVLVKDYYIAIPNIVGFIFGVLQMVLYVIYKNFKTAVPMEPKLPYSIDIAKLSPVSCEMKPAVCPQSNEEDDHTDQNSKDRSNQEQPNQFEV

SEQ ID NO: 133 - protein, 250 aa, Populus trichocarpa
MEIAHFLFGIFGNATALFLFLAPTITFRRIIRSKSTELFSGIPYVMTMLNCLLSAWYGMPFVSKNNILVSTINGTGAVIEAVYVLTFIIYAPKKEKAKFIGLLTLVLTTFAGVALVSLVVLHGKPREIFCGFAAAIFSIIMYGSPLSIMRTVVKTKSVEFMPFFLSLFVFLCGTSWFVFGLLGGDLFVAVPNGVGCGLGALQLILYFIYRNNKGEDKKPALPVKSMQMGIAKLHQQKELVANGSHVADKV

SEQ ID NO: 134 - protein, 259 aa, Populus trichocarpa
MGFLSNDQLTFLFGLLGNIVAAGMFLAPVPTFYTIFKRKSSEGFQSIPYSVALMSASLLLYYGLLKTNAYLLISINSIGCAFEVTYLIIYLIYAPKQEKMHTMKLLLIFNMGSFGVVLLLTMLLMKGKPRLSVVGWICAVFSVAVCAAPLSIMRRVVRTKSVEYLPFTLSASITLNAVMWFFYGLLQHDYYIALPNVLGFLLGIAQMILYMVYKNLKKNVEEKSEQLAGNMEVVQMTKETESCTVDDPHMETKICICDL

SEQ ID NO: 135 - protein, 269 aa, Populus trichocarpa
MALHFTWVFGFGLLGNIISCLVCLAPLPTFYQICKKKTSQGFQSIPYVIALFSAMLWLFYASFSENAMLLITINSFAFFMEIGYIAVYLFYATKKDKILTFKLLLLFNIFGFGLICALSLLLTEGTKRVHVLGWICMVFALCVFVAPLGVVRKVIRTKSVEFMPFSLSFFLTLSAVMWFFYGYLKKDKFVAIPNILGFIFGILQMVLYLIYRNPKKNEVAEPRTQELSEQYCSDINIAMPKLNEGGNEVFEAHSAKDQTKEAMDVTNKV

SEQ ID NO: 136 - protein, 238 aa, Populus trichocarpa
MANTIFIVGVLGNIISSLAYLSPLKTFWRIVKNRSTEDFSSIPYICTLMNATLWIYYGITKPDSFLIATINGFGAVTQIVYILIFLVFISPRMRAKTALLVGLLDVGFPAAAISFTHFMFQGDVRIDVVGFICDCSGMLVYASPLAAMKTVITTKSVEFMPFLLSFAILLNGGFWTLYALLAKDILVGIPNGIGLLLGIAQLILYGIYHRYEPLKKASDNLEDGLQNESLIPACDSVS

SEQ ID NO: 137 - protein, 238 aa, Populus trichocarpa
MESLIFYIGVIGNVISVLMFLSPVGTFWRIIKHRSTEDFESLPYVCTLLNSSLWTYYGIIKPGAYLVATVNGFGILVEIIYVSLFLIYAPVKMRNKTAILAGILDVGVLAAAILAARLALHGQVRIDAIGFICAGLNIIMYGSPLAAMKTVVTTKSVEYMPFFLSFFFFLNGGIWTFYAILTRDYFLGVPNGAGFLLGIAQLVLYAIYMNVKPSINVSNRLEEGCEQESLISSLNYSN

SEQ ID NO: 138 - protein, 239 aa, Populus trichocarpa
MLSTVLSSGCSDAAGLAGNLFAFVLFVSPIPTCRRIIRNQSTEQFSELPCIYALLNCLICLWYGMPFVTPGVILVATVNSIGAAFQLIYAIIFIIYADKSKKLRMSALLIAVFAFFGMVVFVSLRFLETHLRQMVVGYLSVFSLISMFASPLFIINLVIKTQSVEYMPFYLSLSTFLTSLSFSTYGVLKFDPFLYVSMFLQVPNGIGTILGIVQLALYYYYSSKYGEGCSREPLLASYA

SEQ ID NO: 139 - protein, 235 aa, Populus trichocarpa
MSDSVHNPVWTSCKDAAGIAGNIFAFGLFVSPIPTYRRIIRNRSTEQFSGLPYIYALMNCLICMWYGMPLISADNLLVVTVNSFGTVFQLAYIILFIIYAERKIKVSMLASLLVVLVLFAIIVAGSLQIHDRMIRWISVGSLTVVSLISMFASPLFIINLVIQTKSVEFMPFYLSLSTFLMSTSFLLYGVLNFDAFIYVPNGIGTILGIIQLMLYLHYKKKSVQESKEPLIVSHA

SEQ ID NO: 140 - protein, 139 aa, Populus trichocarpa
MSDSVHNPVWTSCKDAAGIAGNIFAFGLFVSPIPTYRRIIRNRSTEQFSGLPYIYALMNCLICMWYGMPLISADNLLVVTVNSFGTVFQLAYIILFIIYAERKIKVFIPFYLQNLSTFYGFYVLIHLHLLSLVAGRLVC

SEQ ID NO: 141 - protein, 242 aa, Populus trichocarpa
MVSAEAARNVVGIIGNVISFGLFLSPVPTFYRICKKKDVEEFQPYPYAATVLNCLFWILYGLPIVKPDSTLVVTINSVGLVLELIYLSIFCIFDTQNKGRKKVFLVLFGEVIFMAAIVVTTFLAFHTHEKRTLFVGVFCDIFNILMYASPLTIVKKVVTTKSVEYMPLSLSLANFLNGCVWTAYALIRFDIFILVSNGLGAFFGFLQLVLYAFYYKSTPKRGSQDVKPSEIQLSASDAASRA

SEQ ID NO: 142 - protein, 282 aa, Populus trichocarpa
MAVMNMQHPLAFTFGILGNIISFMVYLAPVPTFIRILRKKSTEDFQSLPYLVALFSSMLWLYYAMLKNDEILLVTINSFGCVIETIYIAIYIAYATRESKVSTIKLLLSMNMGLFSLIILLTHFLASGSTRVKALGWLCVAFSVCVFAAPLNIVKQIIRTKSVEFMPFTLSFFLTLSAVIWFAYGLFIKDMCVALPNILGFVLGLLQMLLYGIYRNAEKKKIPAENLKSIVILGTLGASEVYPVDPQPDVSAAEHDQTEESKENEKSMEASHDDLQSNECAV

SEQ ID NO: 143 - protein, 283 aa, Populus trichocarpa
MALHLTWVFGFGLLGNIISCLVCLSPLPTFYQICKKKTSEGFQSIPYVIALFSAMLWLFYTIFKKDTILLITINSFAFFMAIGYIVVYLFYATKKDKILTFKLLLLFNVFGFGLVCVLTLFLTQGHKRVQVLGWICMIFSICVFVAPLFIARKVIKTKSVEFMPFSLSFFLTLSALMWFFYGYLKKDQFVAIPNILGFILGLLQMLLYMIYRNPKKVVEVEPKLQLEISEHVVDLEKLGPTIFSEITIVIPKLNDSGNGFVEDQNAKRQAMEIMKAIDVVNKL

SEQ ID NO: 144 - protein, 255 aa, Populus trichocarpa
MGDTLRLAVGVMGNAASMLLFSAPILTFYRIIRKKSTEEFSCVPYIIALLNCLLYTWYGLPVVSYRWENFPVVTINGLGILLEFSFIFIYFWFTSARGKATIGVQIKVAITVIPVILVFCITAAISAFALHDHHHRKIFVGSVALVASVAMYGSPLVVVKKVIMTQSVEYMPFYLSFFSFLASSFWMAYGLLSHDLFLAAPNLVGSPLGFLQLILYCKYRKTGIMEEPEKWDLERNEEKSKQLQLVINDSTNDKS

SEQ ID NO: 145 - protein, 248 aa, Vitis vinifera
MDAHHALHFTFGIFGNATALFLFLAPLITFKRIIKSKSTEQFSGIPYVMTLLNCLLSAWYGLPFVSKNNILVSTINGTGAAIEIIYVLIFIAYSIKKERAKILGLFIFVLSVFGVVVFVSLFALHGHSRKLFCGLAATIFSIIMYASPLSIMRMVIKTKSVEYMPFFLSLFVFLCGTSWFVFGLLGKDPFVAVPNGFGCGLGAMQLILYAIYCKKGKSKNLAAADKPVDMELGKPQQEKQSRAQNGNV

SEQ ID NO: 146 - protein, 235 aa, Vitis vinifera
MSRSLLLPVNTICKDAAGVAGNIFAFGLFVSPIPTFRRIARNRSTESFSGLPYIYALLNCLVTLWYGTPLVSYNNIMVTTVNSMGAAFQLVYIILFITYTDKRKKVRMFGLLMVDIVLFLVIVVGSLEISDFTIRRMVVGFLSCAALISMFASPLFVINLVIQTRSVEFMPFYLSLSTFLMSASFLAYGILNNDPFVYVPNGAGTVLGIVQLGLYSYYKRTSAEESREPLIVSYG

SEQ ID NO: 147 - protein, 232 aa, Vitis vinifera
MSSVYSVCCDAAGIAGNLSAFVLFVSPIPTFRRIIRNGSTEQFSGLPYIYALLNCLICLWYGMPLVSPGIILVATVNSVGAIFQLIYIGIFITFAEKAKKMKMSGLLTAIFGIYAIIVFASMKLFDPHARQLFVGYLSVASLISMFASPLFIINLVIRTRSVEYMPFYLSLSTFLMSLSFFTYGMFKHDPFIYVPNGIGTILGVVQLVLYAYYSRTSTEDLGLRESFIESYA

SEQ ID NO: 148 - protein, 249 aa, Vitis vinifera
MGDRLHLAIGVMGNAASLLLYTAPILTFARVMRKKSTEEFSCIPYIIALLNCLLYTWYGLPVVSYRWENFPVVTINGLGILLEFSFILIYFWFTSPRGKIKVVGTVVPVVTVFCITAIISSFVLHDHHHRKMFVGSVGLVASVAMYGSPLVVVRQVILTKSVEFMPFYLSFFSFLTSFLWMAYGLLGHDLLLASPNLVGSPLGILQLVLYCKYRKRGIMEEPNKWDLEGNDEKSKQLQPVINNDSNGKI

SEQ ID NO: 149 - protein, 270 aa, Vitis vinifera
MALFPIHHPLVFIFGILGNLISFMVYLAPLPTFYQIYKRKSTEGFQSVPYVVALFSAMLWIYYAFLNTDASLLITINSVGCVIETSYIVMFLVYAPKKARITTVKLVFLMNICGFGSILLLTLLLAEGANRVRILGWVCLVFSLSVFLAPLCIMRQVIRTKSVEYMPFLLSFFLTLSAVMWFFYGLMLKDFYIAGPNILGFVFGIVQMVLYLIYRNRKKVLENEKLPELSEQIIDVVKLSTMVCSEVNLTNQQHSNEGHGTTGLEVIVAL

SEQ ID NO: 150 - protein, 276 aa, Vitis vinifera
MAMLTVPHMAFAFGILGNIVSFLVYLSPLPTFYRIYKRKSTEGFQSIPYSVALFSAMLLLYYAFLKTDNQIMLITINSVGTCIEATYLLVYMIYAPRTAKIYTAKLLLLFNTGVYGAIVLSTFFLSKGHRRAKIVGWVCAAFSLCVFAAPLSIMRLVIRTKSVEYMPFPLSFFLTICAVMWFFYGLLIRDFYIAFPNILGFAFGIAQMILYTIYKNAKKGVLAEFKLQELPNGLVFPTLKKAENTDTNPNDQPEDTAMTEGGARDKAVEPSGELKV

SEQ ID NO: 151 - protein, 259 aa, Brachypodium distachyon
MEHVARFFFGVSGNVIALFLFLSPVVTFWRIIRKRSTEDFSGVPYNMTLLNCLLSAWYGLPFVSPNNILVTTINGAGSVIEAIYVIIFLIFAERKSRLRMTGLLGLVTSIFTTVVLVSLLALHGQARKVFCGLAATVFSICMYASPLSIMRLVIKTKSVEFMPFLLSLSVFLCGTSWFIYGLLGRDPFIAIPNGCGSFLGLMQLILYAIYRNNKGTGAGAGKAVDEVEDAKKATVAMEMAETKVAVDEPAAVDKVAAQV

SEQ ID NO: 152 - protein, 256 aa, Brachypodium distachyon
MEDVAKFLFGISGNVIALFLFLSPVPTFWRIIRKKSTEEFSGVPYNMTLLNCLLSAWYGLPFVSPNNILVSTINGAGAAIEACYVVIFLCFASSKKARLRTLGLASAVVAVFAAVALVSMLALHGPGRKLLSGLAMAVFSICMYASPLSIMRLVIRTKSVEYMPFLLSLAVFLCGTSWFVYGLLGRDPFVAVPNGCGSVLGAAQLILYAVYRNNKGKSSDGKLQGSDDVEMSVDARNNKVAHGDDAGGSQDVQQDS

SEQ ID NO: 153 - protein, 250 aa, Brachypodium distachyon
MFPDLRVTTGIIGSVVCLLLYAAPILTFKRVIKKGSVEEYSCIPYILTLFSSLTYTWYGLPVVSSGWENLTLSGISSLGVLFESTFISIYIWFAPRGKKKLVMAMVSSIVIIFGMAVFFSSFSIHTHQMRKVFVGSIGLVASILMYGSPLVAVKQVIRTKSVEFMPFYLSLFSFLTSLLWMLYGILGRDVFLTAPSCIGCLMGILQLVVYCMYNKCKESPKTNPDIEQADVVKVTTSQDDTKGQKPLSES

SEQ ID NO: 154 - protein, 272 aa, Hordeum vulgare
MEHIARFFFGVSGNVIALFLFLSPVVTFWRIIKRKSTEDFSGVPYNMTLLNCLLSAWYGLPFVSPNNILVTTINGAGSVIEAIYVVIFLIFAERRSKIRMLGLLSVVTAIFTTVVLVSLLALHGKGRTVFCGLAATVFSICMYASPLSIMRLVIKTKCVEFMPFLLSLSVFLCGTSWFIYGLLGLDPFIYIPNGCGSFLGLMQLILYAIYRKNKGPAAGAVPAGKGEDADEVEDGKKAAAAVEMGEAKVNKANDDSAVDVDEQAVDKVASQV

SEQ ID NO: 155 - protein, 262 aa, Hordeum vulgare
MEDVAKFFFGISGNVIALFLFLSPVPTFWRIIRNKSTEEFSGVPYNMTLLNCLLSAWYGLPFVSPNNVLVSTINGVGAAIETVYVVIFLVFASSRKARLRTLGLASAVAAVFAVVALVSMLALHGPARKLLAGLAMTVFSICMYASPLSIMRMVIKTKSVEYMPFLLSLAVFLCGTSWFIYGLLGHDLFVTIPNGCGSVLGAAQLILYAVYWNNKGNAAAGAGKMQGDDVEMSVDGRNNKVADGDDSGARESKKAGKMVSQV

SEQ ID NO: 156 - protein, 289 aa, Hordeum vulgare; identical to SEQ ID NO: 106

SEQ ID NO: 157 - protein, 292 aa, Hordeum vulgare
MGGLSAQHPWAFTFGLLGNVISFMTYLAPLPTFYRIYKNKSTQGFQSVPYVVALFSAMLWIYYALLKSDEYLLITINTAGCVIETIYIVLYLAYAPKQARLFTAKILLLLNVGVFGLILLLTLLLTAGERRVVMLGWVCVGFSVCVFVAPLSVIRLVVRTRSVEFMPFSLSLSLTASAVVWFLYGLLIKDKYVALPNILGFAFGVIQMGLYALYRNATPIPAPKEMDAPESEDGAVKAPEHVVNIAKLGTAAAAIELNTNHPVEPPPPMKEGTAKACATGEKLDKATHVEQV

SEQ ID NO: 158 - protein, 307 aa, Hordeum vulgare
MLAVCTFTETNKRNIISLMVFLSPLPTFYRVYRKKSTEGFQSTPYLVTLFSCLLWMYYAFLKSGSELLLTINGVGCVIETLYIAMYLVYAPKSARFLTAKLFIGLDVGLFGIIALVTMLASAGTLRVQVVGWICVAVALGVFAAPLSIIRLVIRTKSVEFMPFSLSFFLVLSAVVWFAYGALKKDIFVAVPNVLGFVFGIAQMALYMAYRNKKPATVVLVHEEMKLPEHVKEVGAGGAKPQGGAPTEGRISCGAEVHPIIDVLPAAGAVDEEAAAAADEDVIRDDHNMLRPEQPAIIKPDVAIVVQA

SEQ ID NO: 159 - protein, 256 aa, Sorghum bicolor
MEDVVKFIFGICGNVIALFLFLSPVPTFWRIIRRRSTEDFSGVPYNMTLLNCLLSAWYGLPFVSPNNILVSTINGAGAAIEAVYVVIFLVFASSQRTRLRMLGLASAVAAVFAAVALVSMLALHQGQGRKLMCGLAATVCSICMYASPLSIMRLVVKTKSVEYMPFLLSLAVFLCGTSWFVYGLLGRDPFVAIPNGCGSFLGAVQLVLYAIYRNSAGTAGAGKQQAGDDVEMAADAKSSKKVADDVGGAGKEGRLV

SEQ ID NO: 160 - protein, 231 aa, Sorghum bicolor
MSSLYDLSCFAAGLAGNVFALALFLSPVPTFKRVLKAKSTEQFDGLPYLLSLLNCCICLWYGLPWVSGGGGRALVATVNGTGALFQLAYISLFIFYADSRTTRLRITGLLVLVVFAFALIAHASIALFDQPVRQLFVGSVSMASLVSMFASPLAVMGLVIRTECVEFMPFYLSLSTFLMSASFAMYGLLLRDFFIYFPNGLGVVLGAMQLVLYAYYSRRWKNSGSSAALLA

SEQ ID NO: 161 - protein, 171 aa, Sorghum bicolor
MALMLTFKRVVKEASVGEFSCLPYILALFSAFTWGWYGFPIVSDGWENLSLFGTCAVGVLFETSFIIVYIWFAPRDKKKQVISTKSVEFMPFYLSLFSLLTSFTWMLYGILGRDLYLTVPNGAGCITGILQLIVYCIYRRCNKPPKAVNDIEMVNDLDVATSREDTNGCKP

SEQ ID NO: 162 - protein, 259 aa, Sorghum bicolor
MVPNTVRVAVGILGNAASMLLYAAPILTFRRVIKKGNVEEFSCVPYILALFNCLLYTWYGLPVVSSGWENLPVATINGLGILLEITFIGIYIWFAPAEKKRFALQLVLPVLALFALTAALSSFMAHTHHMRKVFVGSVGLVASISMYSSPMVAAKRVIETKSVEFMPFYLSLFSFLSSALWMIYGLLGRDFFIASPNFIGVPMGMLQLLLYCIYRRDHGAAAEAEVRVHGAAADEEKGLKAAVPMAVLVQPQETTDASK

SEQ ID NO: 163 - protein, 250 aa, Sorghum bicolor
MVSPDTIRTAIGVIGNGTALVLFLSPVPTFIRIWKKGSVEQYSPIPYVATLLNCMMWVLYGLPVVHPHSMLVITINGTGMAIQLTYVTLFLLYSAGAVRRKVFLLLAAEVAFLGAVAALVLTLAHTHERRSMIVGILCVLFGTGMYAAPLSVMKMVIQTKSVEYMPLFLSLASLVNGICWTAYALIRFDLYITIPNGLGVLFAVAQLVLYAMYYKNTQKIIEARKRKTDQVAMTEVVVDGSGRASNNNTY

SEQ ID NO: 164 - protein, 250 aa, Sorghum bicolor
MISPDTIRTAIGVIGNGTALVLFLSPVPTFIRIWKKGSVEQYSPIPYVATLLNCMMWVLYGLPAVHPHSMLVITINGTGMAIQLTYVTLFLLFSAGAVRRKVVLLLAAEVAFVGAVAALVLSLAHTHDRRSMVVGILCVLFGTGMYAAPLSVMKMVIQTKSVEYMPLFLSLASLVNGICWTAYALIRFDLYITIPNGLGVLFAVAQLVLYAIYYKSTQEIVEARKRKAEQVAMTEVVIDGGKTNNHASGY

SEQ ID NO: 165 - protein, 252 aa, Sorghum bicolor
MVSKDTIRTAIGVIGNGTALVLFLSPVPTFVGIWKKRAVEQYSPIPYVATLLNCMMWVVYGLPVVHPHSMLVVTINGTGMLIQLSYVVLFILCSTGAVRRKVVLLFAAEVAFVVALAALVLSLAHTHERRSMVVGIVSVFFGTGMYAAPLSVMKMVIETKSVEYMPLFLSLASLANSICWTAYALIRFDVYITIPNGLGVLFALGQLVLYAMFYKNTQQIIEARKRKADHQQGTVMEVVTDATPPNNNGNTY

SEQ ID NO: 166 - protein, 239 aa, Sorghum bicolor
MVNLDEVRNVVGIIGNFISFGLFLAPLPTFLTIIKKRDVEEFVPDPYLATFLNCALWVFYGLPVVHPDSILVATINGTGLAIEAAYLSVFFAFAPKPKRAKMLGVLAVEVAFVAAVVAGVVLGAHTHEKRSLVVGCLCVLFGTLMYASPLTVMKKVIATQSVEYMPFTLSFVSFLNGICWTTYALIRFDIFITIPNGMGTLLGLMQLILYFYYYGSTPKSSGTTAGMELPVKAGDGDSN

SEQ ID NO: 167 - protein, 244 aa, Sorghum bicolor
MISPDAARNVVGIIGNVISFGLFLSPAPTFWRIYKARDVEEFKPDPYLATLLNCALWVFYGIPVVHPNSILVVTINGIGLVIEGIYLTIFFIYADAKKRKKAFAILFVEILFMVAVVLGVILGAHTHEKRSMIVGILCVIFGSVMYASPLTIMGKVIKTKSVEYMPFLLSLVNFLNGCCWTAYALIRFDLYVTIPNALGAFFGLIQLILYFWYYKSTPKKEKNVELPTVSRNVGGGNVTVSVER

SEQ ID NO: 168 - protein, 213 aa, Sorghum bicolor
MVSDVVAFLGFLASFSLFASPAFIFRRIITEASVVGYPFLPYPMAFLNCMIWLFYGTVHTNSDYVIIINSVGMIIEVIFMGFYIWFADGMDLRVALIELFGMGGLGTFVALLGYLWRDTVFGYAGVVSGIIMYGSPLSVARRVFETRNVQNMSLLMALASLTASSVWTAYAFASKPYDFYIAIPNLIGLVLALVQLALYAYYYFNGEEEDVVA

SEQ ID NO: 169 - protein, 309 aa, Sorghum bicolor
MAGGLFSMAHPAITLSGIAGNIISFLVFLAPVATFLQVYRKKSTGGFSSVPYVVALFSSVLWIFYALVKTNSRPLLTINAFGCGVEAAYIVFYLAYAPRKARLRTLAYFFLLDVAAFALVVVVTLFVVREPHRVKFLGSVCLAFSMAVFVAPLSIIVKVVKTKSVEFLPISLSFCLTLSAVAWFCYGLFTKDPFVMYPNVGGFFFSCVQMGLYFWYRKPRPAKNNAVLPTTTDGASAVQMQGQVIELAPNTVAILSVSPIPIVGVHKIEVVEQQHKEAAVAAETRRMAAANPDGAMPEVIEIVPAVATV

SEQ ID NO: 170 - protein, 273 aa, Sorghum bicolor
MAGGLFSMEHPWVSAFGILGNIISFLVFLAPVPTFLRVYRKKSTEGFSSVPYVVALFSCTLWILYAVVKTNSSPLLTINAFGCVVEATYILLYLIYAPRAARLRALAFFFLLDVAALALIVVVVVVLVAEPHRVKVLGSICLAFSMAVFVAPLSVIFVVIRTKSAEFMPFTLSFFLTLSAVAWFLYGIFTKDPYVTLPNVGGFFFGCIQMVLYCCYRKPSASVVLPTTTDAAATEMELPLAAHQAVAPVLAELQKLEEAMGSPRKHGGVVKVV

SEQ ID NO: 171 - protein, 313 aa, Sorghum bicolor
MITVGHPVVFAVGILGNILSFLVTLAPVPTFYRVYKKKSTESFQSVPYVVALLSAMLWLYYALLSIDVLLLSINTIACVVESVYLAIYLTYAPKPAMAFTLKLLFTMNMGLFGAMVAFLQFYVDGQRRVSIAGGVGAAFALAVFVAPLTIIRQVIRTKSVEYMPFWLSFFLTISAVVWFFYGLLMKDFFVAMPNVLGLLFGLAQMALYFVYRNRNPKQNGAVSEMQQQAAVVQADADAKKEQQLRQAHADAGADGEAVAVRIDDEEEPKNVVVDIMPPPPPLLPAERASPPLPLPPPPAMVMMTAHQTAVEVV

SEQ ID NO: 172 - protein, 304 aa, Sorghum bicolor
MAGLSLQHPWAFAFGLLGNVISFMTFLAPIPTFYRIYKTKSTEGFQSVPYVVALFSAMLWIFYALIKSNETFLITINAAGCVIETIYIIMYFVYAPKKGKMFTAKIMLLLNVGIFGVILLLTLLLFKGDKRVVMLGWICVGFSVSVFVAPLSIMKRVIQTKSVEYMPFSLSLSLTLSAVVWFLYGLLIKDKYVALPNILGFTFGVVQMVLYVLYMNKTPVAVAEGKDAGGKLPSAADEHVLVNIAKLSPALPERSSGVHPVVAQMAAVPNRSCAAEAAAPPAMLPNRDVVDVFVSRHSPAVHVV

SEQ ID NO: 173 - protein, 302 aa, Sorghum bicolor
MAGLSLQHPWAFAFGLLGNLISFLTFLAPIPTFYRIYKTKSTEGFQSVPYVVALFSAMLWIFYALIKSNETFLITINAAGCVIETIYIVMYFVYAPKKAKLFTAKIMLLLNVGVFGVILLVTLLLFKGDKRVVMLGWICVGFSVSVFVAPLSIMRRVIQTKSMEYMPFSLSLSLTLSAVVWFLYGLLIKDKYVALPNILGFTFGMVQMVLYVLYMNKTPVAVAEGKDAGGKLPSAGDKHVLVNIAKLSPALPERSSGVHRATQMSAVPAKSCAAEATAPKVMLPNRDVVDVFLSQALHRKQA

SEQ ID NO: 174 - protein, 302 aa, Sorghum bicolor
MAGLSLQHPWAFAFGLLGNVISFLTFLAPIPTFYRIYKSKSTEGFQSVPYVVALFSAMLWIFYALIKSNETFLITINAAGCVIETIYIVMYFVYAPKKAKLFTAKIMLLLNVGVFGVILLVTLLLFKGDKRVVMLGWICVGFSVSVFVAPLSIMRRVIQTKSVEYMPFSLSLSLTLSAVVWFLYGLLIKDKYVALPNILGFTFGVVQMVLYVLYMNKTPVAVAEGKDAGVKLPSAADEHVLVNITKLSPALPDRSSGVHRATQMAAVPASSCAAEAAAPAMLPNRDVVDVFVSRQSPAVHVV

SEQ ID NO: 175 - protein, 291 aa, Sorghum bicolor
MAGLSLQHPMAFAFGLLGNIISFMTYLAPLYRPTFYRIYKSKSTQGFQSVPYVVALFSAMLWIYYALLKSNEFLLITINSAGCVIETLYIVMYLLYAPKKAKLFTAKILLLLNVGVFGLILLLTLLLSAGQHRVVVLGWVCVAFSVSVFVAPLSIIRQVVRTRSVEFMPFSLSLSLTVSAVVWFLYGLLIKDKYVALPNVLGFSFGVVQMGLYALYRNATPRVPPAKEVTDDDAAADGTFKLPGEHVVTIAKLTAVPAVSPQLQEEAKPADNGTTPAPAPANDVQLNAEQV

SEQ ID NO: 176 - protein, 336 aa, Sorghum bicolor
MAFLNMEQQTWAFTFGILGNIISLMVFLSPLPTFYRVYRKKSTEGFQSTPYVVTLFSCMLWIFYALLKSGAELLVTINGVGCVIETVYLGMYLLYAPKAARVLTAKMLLGLNVGVFGLVALVTMVLSNGGLRVKVLGWICVSVALSVFAAPLSIMRQVIRTKSVEFMPISLSFFLVLSAVIWFAYGALKKDVFVAAPNVLGFVFGLAQMALYMAYRNKKPAAAAVIMVEEVKLPAEQYASKEVAPPAAAHEGSRASCGAEVHPIDIDTLPVADVGRHHDSQAVVVIDVDVEPAATCAAAAAAAGGVRGDGAAGVVTAGPEQPAAMKPVDMAIAVEA

SEQ ID NO: 177 - protein, 166 aa, Sorghum bicolor
MEAIYVVLFIVYAANHATRVKTVKLAAALDIGGFGVVYAVARFAINELDLRIMVIGTICACLNVLMYGSPLAAMKTVITTKSVEFMPFFLSFFLFLNGGIWATYAVLDRDMFLGIPNGIGFVLGTIQLIIYAIYMNSKTSQSSKETASPLLASDHNQGEASSHSHV

SEQ ID NO: 178 - protein, 329 aa, Sorghum bicolor
MTTPSFLVGIAGNVISILVFASPIATFRRIVRNKSTGDFTWLPYVTTLLSTSLWTFYGLLKPKGLLVVTVNGAGAALEAVYVTLYLVYAPRETKAKMGKLVLAVNVGFLAVVVAVALLALHGGARLDAVGLLCAAITIGMYAAPLGSMRTVVKTRSVEYMPFSLSFFLFLNGGVWSVYSLLVRDYFIGVPNAVGFVLGTAQLVLYLAFRNKAAERKDDDDEKEAAAAAPSSGDEEEGLAHLMGPPQVEMEMTAQQRGRLRLHKGQSLPKPPTGGPLSSSSSSSPHHGFGSIIKSLSATPVELHSVLYQHGLGRGRFEPVKKDDVDATNH

SEQ ID NO: 179 - protein, 260 aa, Picea sitchensis
MLIAHFIFGIFGNITALTLFLAPLITFWTIIKNKSTEQFSGFPYVSTLLNCLLSAWYGLPFVSPNNLLVSTVNGTGAAIELCYVIVFLFYIRDKKYRVKIFGLLVIVLKFFALVALVSLLALHGHARKLFCGFAAAIFSICMYASPLSIMRTVIKTKSVKYMPFFLSLCVFLCGTSWFIFGLLGKDPFLAVPNGVGSALGAMQLILYAVYKDWKKKDSNTWSPPVQEEGKAGADHMNAMEMGSYGQTEAHNPSGKYVNGF

SEQ ID NO: 180 - protein, 272 aa, Picea sitchensis
MEKDHIRLAVGIIGNITSLLLYGAPVLTFMKVIKEKSVGQYSCTPYLIALFNCLIYTWYGFPVVSNGWENFLVSTVNGVGIVPECFAICTYIVYAPPKFKRKVARMVGCVLVLFGVMAAISFFSLHDHKNRKFMIGIVGILSSISLYSAPFVAMKLVIQTKSVEFMPFYLSFFAFINCIMWMTYGALSRDIFLATPNVIGSPLALAQLVLYCIYRKKTRGVQNGNNLDPEEGVQINGAQSTNSEEKTKLPDGQKGENAEYINTTEIKTILIN

SEQ ID NO: 181 - protein, 231 aa, Picea sitchensis
MMPDEEIWHYATGIADNFFALGLFLSPIPTFRRITKNKSTEQFSGLPYIFALLNCLICTWYGLPFVSRNNILVTTVNGTGAIFQLFYISLYIVYSQKEARVKMVVLLSLVMAIFISIVLVTYEFMKQPLRKVFVGSLSVISLVSMFASPLSIIKLVIETHSVEYMPFYLSLSTLLMSVSFFTYGFLGQDPFVYVPNGIGSVLGIIQLGLYFYYRNNRRRRQAVQPLLSSTA

SEQ ID NO: 182 - protein, 293 aa, Picea sitchensis
MHYPLQLALGIVGNGTSLALFLSPLPTFWSIYKLRSTQEFSELPYVCTLFTCALWLLYGTPFVKPNSILILTINGVGFILEFFYLMCYLAFAPKKRKIKTMRFTFIMSLAFVGVVLITLLAIHTNASRQLVAGTVCVLLSIAMYASPLLIIGLVIRTKSVEYMPFLLALFNLLNALTWAAYSVVTRDIFVAIPNGIGCVCGFIQLTVYCIYRNSKAIPSTKIEDVSQTKPNDAVHGSSIQKVQEDSVVSTKVSSPRFLSLQRVSPRIDPALRARCEDTLIVIDTLSREASSSP

SEQ ID NO: 183 - protein, 228 aa, Picea sitchensis
MANVSFILGVIGNVISLLVFLSPAKTFWRIVRNNSTEDFHYLPYICTLLSTSLWTYYGLIKPGGLLISTVNGAGAVLESVYVILFLIYCPKELKIKAAVLVVLVDIIAFTSVFLVTFLALDQQIRITVIGVLCVCLSLTMYGSPLAITRSVIVTKSVEFMPFFLSFFLFLNGGIWAAWAVLKQDVFVGIPNGIGFGLGASQLILYLIYRKGKPKAEVTQNLLHTDMNA

SEQ ID NO: 184 - protein, 335 aa, Picea sitchensis
MADVSFIIGVVGNVISLLLFISPVKTFWRIVKNKSTQDFKPLPYICTLLSTSLWTYYGLIKPGGLLIVTVNGAGAALEAVYVILFIFYATKEHKLKTIVLVLLVDVVFFAAVFLVTFLVLNQHIRLIVVGSLCVCVTLSMYVAPLAVMRSVMVTKSVEFMPFFLSFFLFLNGGVWAVWAVLERDVFVGIPNGTGFGLGAAQLLVCMIYGKGKPRREGIREEDVKTEGFKLVGDIEMGGEDGADSKSHPNNLDEKRVSIPKANIHGLRKHVKSLSLDSGKLQSDADQLQFRLSLVPHHEGEIQKTSENTECEKSYAESQPALIFCNWESHRPKHMH

SEQ ID NO: 185 - protein, 301 aa, Physcomitrella patens
MVVDDGGKGSFLFCEVGPADPVTFMQELYIATETMGHLNIKDILGILGNITAICLITSPIPTFVDIVKRKSVGDYSGIPYICTLLNCLLWVVYGLPVVELQVLVVTINAAGVVIEMIYIGLYLKNAQRSVRVKVMKVLLAVLILFTAIAVLVFVLIHDRKTRKLLVGTLCAVFGVGMYISPLAVMRLVIWTRSVEYMPFLLSLFNFINGLVWFGYAVIGHLDIFIAIPNCLGALSGVAQLSLYAYFRPATPTVRDRNEEKGNSMKWVSSSVSILVEQNDHPPLNQPCGSIEALQICEKASN

SEQ ID NO: 186 - protein, 257 aa, Physcomitrella patens
MGHVDFKVILGVLGNITAICLFASPIPTFINIVKKKSVGDYSGIPYVCTLLNCLLWVVYGLPVVEYQVLVVTINAAGCIIELIYLALYLKNAHKSIRMKVMKVLLAVLILFTLVTVIVLELIHDKKKRKLVIGTLCAVFAVGMYVSPLTVMRMVIRTRSVEYMPFLLSLFNFINGLVWFGYAFIGGLDIFIAIPNGLGALSGVAQLSLYAFYRNATPVVRDRDDVEKAKHMKPNTDSVYVQMGQNGHPPQSEANGAH

SEQ ID NO: 187 - protein, 260 aa, Physcomitrella patens
MGHVDFKVILGVLGNITAICLFTSPIPTFIKIVKKKTVADYSGFPYVCTLLNCLLWVVYGLPVVEFQVLVVTINAAGCFIEFLFLTLYLLNAEKKIRMKVMKLLMLVLVSFIAVTVLVLELIEDKKKRKTVIGTLCAVFAVGMYASPLSIMRMVIQTRSVKYMPFLLSLFNFINGLVWFGYAFIGGVDIYIAIPNGLGAASGIAQLALYAFYRNATPRDGDEKGNPTKATNNNFASIELEKNGAQKQSSHVSKSQTNEIV

SEQ ID NO: 188 - protein, 267 aa, Physcomitrella patens
MRGRSVEPISIHWYFAAAVSDHQKMFCPVCCWSGNITAICLFTSPVPTFSKIVKKKTVAEFSGIPYVCTLLNCLLWVVYGLPIVEFQVLVISINAAGCLIEFTYLALYLTYAQKSIRMKVMKVLMAVLITFIAVTILVLELVHDKKKRKLIIGTLCAVFAVGMYVSPLTVMKMVIQTRSVKYMPFLLSLFNFINGLVWFGYAFFGGIDIFIAIPNGLGALSGIAQLALYAFYRNATPRDEDEKDGPTKPTNNSIEMEKNDTYKQSNV

SEQ ID NO: 189 - protein, 360 aa, Physcomitrella patens
MCEHARGRPTFWRIVKSRKVDDFSGMPYLTAALNTCLWTLYGLPFVSFQVLVVTVNAAGAGLEISYIIIYLMYSEGKARMRVVKFFAVMVCGFILMTGLVLGLVDSVDTRKTILGVMGAFLGSLMYAAPLTVMRMVIQTKSVEFMPFLLSLFVFLNSTTWTIYAGVPETDLYILIPNGLGLLLGTTQLVLYAMYRGSTPRKPSLPTFSYKLAVETPPKFAPAPDSKANRPLGPGNQKAPENILRIHRVAKASAGYPVSEKGEDVFKGRSCAAEQQQSDSLVTNSGSLPADSVSIHTARSRSDLCGASPSTGTVASVPDLCRRHRFRLLPGLHLHESLCFFYAPAGADNSNSVLDSMPTIS

SEQ ID NO: 190 - protein, 192 aa, Physcomitrella patens
  misc_feature (192)..(192): Xaa can be any naturally occurring amino acid
GNVFSFIMFFSPLPTFWTIIKRRETGQFSVVPYVATLLNCLMWLFYGTSSVAGLMLVLTINAAGVVIESIYIIIHVLFGDFESRKRTGCYFLGIMVLYTIVLCCVTQAVEVNDRVTVVGAICVVIGSIMYSAPMTVIAQVIRDKNVANMPLFLSASSLINSVVWTTYGILVEDVFVIVSNAFNVDTLNVFFX

SEQ ID NO: 191 - protein, 251 aa, Amborella trichopoda
MELAHFLFGIFGNATALFLFLAPVITFRRIIGSKSTEDFSGVPYVSTLLNCLLAAWYGLPFVSPHNILVSTINGAGATIEFVFVTIFLIYANQKKVRVKIFGLLCIALSVFALVVLISLFALHGQSRKLFCGLAATIFSICMYASPLSVMRMVIRTKSVEFMPFFLSLFVFLCGTSWFIYGLIGRDPFIYTPNGFGCALGTIQLILYAIYRKRGPMEGEGEGKGKEGEALEMGYAKSVDGQQNHDATKVSA

SEQ ID NO: 192 - protein, 332 aa, Amborella trichopoda
MISSELDVYNVCCNGVGVAGNLFAFVLFLSPMPTFRRIIRNGSTEQFSGLPYIYALLNCLICLWYGLPVVTQGMLLVATVNSIGALFQLVYISLFITYAERRKKVNMLGLLLAVFSLFAVIVFVSLRFMGPSLRQLFVGYLSVASLISMFASPLFIINLVIQTKSVEFMPFYLSLATFLMSFSFFAFGFLKHDGFIYVPNGIGSLLGVVQLVLYAYYSRKSKDSEEPLLASEYLHRIYCGSGPTYKLSFHMGHHDNQISILAFGSVWVSVRCQMPVALAAVGDGLVLYALVLKAMHVSIGCGILRVLYCSIVCIQIICFTHNPLGGLLWDCS

SEQ ID NO: 193 - protein, 267 aa, Amborella trichopoda
MAFIFAREDSYWSSSLFGGLLSGEFPNTITISDLHLLVGIIGNATAFLLYTAPMLTFRGVIEKRSTEEFSCVPYIISLFNCLLYTWYGFPVVSDKWENITLLTINGFGVLLETSFIAIYFWFAPRQKKRLVSFLVFAVLLVFLTTASISAFFIHDHPHRKALVGSVAVVASATMYSSPLVAIGRVVQTQSVEFMPFYLSLFSFFTSSLWMAYGFLGNDLFIASPNFVGVPMAFLQLVVYYTYRKKKEKAREYEEADVEQKVALLVKD

SEQ ID NO: 194 - protein, 261 aa, Amborella trichopoda
NAASLLLYAAPILTFTRVIKNRSTEEFSCTPYIFALLNCLLYTWYGLPVVSIEWENLPLVTINGLGTILETSFVFIYIYYASPKRKMPVLIMTLSILVVFGISAFASSFALHEHRPRKMLVGTVGMAASATMYSAPLVAVKRVVETKSVKYMPFYLSLFSFLASLHWMTYGLLGHDIILAAPNFVGCPLALLQLVIYFIYRKNKGNMVESQVSDVEKKADMGNPNMTKTQNVDIEKAIIDLEMTVEVRAKDGNTSTQTTNC

SEQ ID NO: 195 - protein, 231 aa, Amborella trichopoda
MVSADTARTVVGILGNIIALCLFLSPVPTFIQICKKGTVERFSPIPYLATLLNCMLWTLYGLPIVHPHSTLVVTINGAGLLIELTYVLLFLIYSAKKQRLKVFLYLLLEITFVGVVAVMVLSLAHSHEKRTLIVGSLCMFFGTMMYVAPLSVMIPNGLGTLFGVAQLALYACFYKSTQRQLAERQAKASEVHLGEVVIASKSVAPSNMNGNSIEIEETPNSFQTSNHVQER

SEQ ID NO: 196 - protein, 248 aa, Amborella trichopoda
MVNPDTVRNIVGIIGNVISFGLFLSPMPTFYMIWKKRAVEHFSAVPYVATLLNCMMWVLYGLPIVHPNSILVVTINGVGFVLESFYLTMFLIYSTKAQRIKVGMYLLCEIVFMAVVISCVLTLAHTHEKRSMIVGILCIIFGTCMYAAPLSVMKRVITTKSVQYMPFFLSLTNFLNGVCWSIYASIHFDINLIIPNGLGALFGAIQLILYGIYCRNKVEEMNEDVKEKEAEYGEIQMQRGINHPNTTG

SEQ ID NO: 197 - protein, 282 aa, Amborella trichopoda
MAFLSVHHPWAFTFGLLGNIISFMVYLSPLPTFHRVYKKKSTEGFQSVPYVVALFSAMLWIYYALLKTDGYLLITINTLGCIIESIYITMYIIYAPKKAKIATAKLVVLLNLGVFCMILLLTLFFVQGPKRVRVLGWVCVTFSVCVFAAPLSIMRLVIQTKSVEFMPFSLSFSLTLSAVMWFSYGLLTKDFYIALPNVLGFIFGIIQMVLYIIYKGTKKAFIDKKLPEQVVNIVKISTLGSSDVFPINGQAVSGECVTDSVEKSLEQVVIVAHTVTENVQDL

SEQ ID NO: 198 - protein, 271 aa, Amborella trichopoda
MEDLSFFFGILGNVISILVFASPIGTFQRVVKKKSTENFKGLPFVCTLLSTSLWSYYGLLKPGGLLVLTVNGVGVAMEAIYVSLFLFYAPKNVKVKTAMLVLVLNVGFLGLVIMVTMLLLHAPLRLQVVGFLSAALTLGMYASPMAVMRRVIVTKSVEYMPFFLFLNGGVWFLYSLLVGDFFIGVPNGIGFILGATQLIVYAVYRNSKSTDQKPDMEELDTKHCFEIEMPRTDKNLEKAEDNSIENVNLHKTSTGFTRGGEGETARARDEV

SEQ ID NO: 199 - protein, 191 aa, Aquilegia caerulea
MEILHFVFGVLGNAAALFLFLAPVITFRRILKSKSTEQFSGIPYIMTLLNCLLSAWYGLPFVSPHNLLVSTINFTGATIESIYVLVYIVFAPKKMRKKMLILLSMVLTVFSTVALVSLFALHGNGRKLFCGFAATIFSICMYASPLSIMRVVITTKSVEFMPFFLSLFTFLCGTFWFIYGLLGHDPFVAEP

SEQ ID NO: 200 - protein, 234 aa, Aquilegia caerulea
MEGLSFFIGVIGNIISVLVFLSPIDAFWRIVKHRSTEEFESLPYICTLLNSLLWTYYGITKPGGLLVATVNGFGVVMEAIYIIIFLTFAASKKRSRTAILAGILDVGFFAAVVLITQLMLEGDLRIDVIGLISAGLNIVMYASPLSAMKTVVTTKSVEYMPFFLSFFLFLNGGVWGFYAVLVRDPFLGIPNGAGFILGIAQLVLYAIYRNSKQSKSILPVMEEGSNSKHEPLLS

SEQ ID NO: 201 - protein, 273 aa, Aquilegia caerulea
MEQASLNSIFYSTKLDLGCSSCLVSTETAQLIRNVVGIFGNVVNLLLYVTPILTFKRVIKNKSTEEFSVVPYVAALLNSVLYTLYGSPLASVGWENVHVFTINAIGCFMETAFIAIYFWYATPTKKITVTFIMVPVIVFSSSMLAMSTMLNDHHLRHTILGSFGFFASASMYGSPLVAVKQVIATKSVEFMPLNLSLFSFLTSFAWMTYALLGNDILLASPNFIGVPLGILQLVVYAIYSKYKGTSEETNKGDLEKQEEADLTTPLITNNESN

SEQ ID NO: 202 - protein, 293 aa, Aquilegia caerulea
MAIFSIQHPLTFTFGVIGNLISLMVYLAPLSTFYRVYKKKSTEGFQSVPYVVALFSAMLWIYYASLKSHSEAYLLITINSFGCFIETIYLAMYMAYAPRKARLLTAKLLLLVNIGLFCLIFLLTFLLAKGPNRIRILGWVCVAFATCVYIAPLSIMRKVIRTRSVEFMPFYLSFFLTLSAIVWFSYGLLLKDLYIMLPNILGFIFGILQMALYVAYRNAKTDVVIVEEEDKQPSEHIIIDVVKITKIAGSERHPIESGIQVKEMNESIIMCKDDEKTDQNEISMRSPNEVQNE

SEQ ID NO: 203 - protein, 300 aa, Aquilegia caerulea
MTIITIQHPLVFSVGLLGNIISFMVFLAPLPTFYHIFKKKSTEGFQSIPYVIALFSSMLWMYYAFLKSDAYLLITINALGCVIETIYIAIFIAYAPKKARVTTAKLLLLLNLGVFCLILLLTILLAKGPTRVNVLGWICVVFSACVFAAPLSIVRLVIRTKSVEFMPFSLSFFLTISAVSWFSYGFLLKDIYIALPNVLGFIFGVLQMILYAIYKNSSKITEEKEVSEKSVATINTTAIVNSQDHVIEVQPTEDQNNVVREDQKAIEIIGKNIDKCMEYPVKFDLPTTVVPMNYPVYVEV

SEQ ID NO: 204 - protein, 258 aa, Aquilegia caerulea
MVSADAIRTAVGILGNIIALALFLSPVPTFIQIWKKGSVEQFSPIPYLATLLNCMFWVLYGLPIVHPHSMLVITINGTGFAIELTYVLLFIFNSEGKNRLRVVVMLLIEIVMVGIVGILVINLAHTYERRSLIVGSICIVFGTMMYVAPLSVMKLVITTKSVEYMPFFLSFASFANGICWTTYALIKFDINITIPNGIGTFLALLQLILYATFYKSTQRIMAERKRKAELGLSEIVVGDSKKIANAPHNGHASEIREM

SEQ ID NO: 205 - protein, 242 aa, Aquilegia caerulea
MPHFETARTVVGWIGQVTSLFLFAAPIATLVKIWKRKDVEEFSPNPYLAGVMNCLMWIYYGLPFVTGKNTLVITINSVGLVLEFIYIGIFLWYCKTKKQRVNVLWKLGAIVGIFVLAAGLELGLTHKGFVRLTIAGVQSTVFSICLYAMPLDVMRMVIKTKSVEYLPLPLCIAGLLNGIDWSAYALFSKKIDPYILTANGLGAILGIVQVILYIIYCRSTPQHSKNPTDQKQVELSNNELIV

SEQ ID NO: 206 - protein, 255 aa, Aquilegia caerulea
MINSEQGGFNTVVRNCVFVSGHRDSSPAYFPYNMENIKLVSIFFSPPPLPLCVPTFRKIVTNRSTEQFSGLPYIYSLLNCLICLWYGLPVVAHGVILVATVNSIGAVFHLVYVSLFIIYGEKKRKVKMAGYLVAVFFVFAVVVLVSLRLFDHQTRRIFVGYLIVASLISMFASLLFIINLVIRTRSIEFMPFYLSLSTFLMSISFFAYGVLKEDAFIYVPNGIGALLGIVQLLLYSYYSRSLREDSSEPLMSSYA

SEQ ID NO: 207 - protein, 305 aa, Aquilegia caerulea
MASIAVIVAIVGNIISILVFLSPVGTFRRVVNKKSTENFLGDTYVCTLLSTSLWTFYGILKPGGFLIATVNGAGAFLQSIYVILYLIYAPKDTKVKYLKLVGALNIVCFGLVIVLILLAVHGSSRLTILGFLCAGLTLGMYASPLSALRTVIKTKSVEYMPFFLSFFLSLNAAVWSAYAVLVKDYFIGVPNAIGLVLGSAQLVLYMTYHKNSAGLTKYTYEVAAEEEGSSHLIQGDLEMGEYKEKEKSERILSKGRSLPKTSVSVSRQHSLQRIVKTHSLSEYELQSKWSLEDDPENVHVNTGHH

SEQ ID NO: 208 - protein, 197 aa, Aquilegia caerulea
MLWLFYAFLKPDGSMLLTINSIGCIIESIYIIVYLIYAPRSYKIYTTKLLLLLNVTVFGLIVLFTMLFAKDAKRVTIVGWICSVFSICVFAAPLSNIRQVIITESVEFMPISLSFFLTLCAIVWFFYGLLTMDLYVAGPNVLGFLFGVVQMILYFIYRRRAKRNVALEVDLAQTQPNDRQPQVKVINQPVQPSESNV

SEQ ID NO: 209 - protein, 253 aa, Aquilegia caerulea
MVFIKLVCTDIEPSLLSRADSNINSAYLICQALCFRPTFFRIFKRKDVEEFSPNPYMATLLNCAMWVFYGPFVTPHSTLVITINGFGLCIELAYITAYLRFANNKKRMRVIKWLAGELCFFVLVVGLTLGFRHTPHDRSLVVGILCVVFNILMYAMPLDIMRMVIKTKSVEYMPFLLSLAGFLNGCIWVTYAQLYRFDLYITISNSAGAFLGAIQLILYGCYYSSTPKRNDRNKTPAEVQLPTTTDGRIRPSV

SEQ ID NO: 210 - protein, 237 aa, Aquilegia caerulea
MFSSSDQLVSTYSVCSDAAGVAGNLFAFVLFLSPIPTFRRIVTNRSTEQFSGLPYIYSLLNCLICLWYGLPVVAHGVILVATVNSIGAVFQLVYVSLFIIYGEKKRKVKMAGYLVAVFFVFAVVVLVSLRLFDHQTRRIFVGYLSVASLISMFASPLFIINLVIRTRSIEFMPFYLSLSTFLMSISFFAYGVLKEDAFIYVPNGIGALLGIVQLLLYSYYSRSLREDSSEPLMSSYP

SEQ ID NO: 211 - protein, 236 aa, Aquilegia caerulea
MNPSSFMSSSSTISICSDVAGVAGNLFAFVLFMSPIPTFQRIIRNKSTEQFSGMPYIYSLLNCLICLWYGLPFVMPDIILVATVNSVGAVFQLIYVTIFIIYAEQAKKVKMLGLLLAVFGIFTLIVLVSMKAFDPYARQLFVGYISMASLVSMFASPLFIINLVIRTRSVEFMPFYLSLSTFLMSISFFSYGMLKSDLFIYVPNGIGALLGAVQLVTYTYYHGISIDESREPLLLR

SEQ ID NO: 212 - protein, 248 aa, Aquilegia caerulea
MGDTLRLAIGIMGNAASLLLYAAPMLTFRRILKKKSTEEFTCVPYILALLNCLLYTWYGLPIVSHEWENFPVVTINGIGILLESSFILIYLWFASPTGKKRVSLMLVPVILLFCITVFVSTFALHNHRQRKILVGSIGVVASIAMYGSPLVVMKQVIQTKSVEFMPFTLSLFSLLASALWMMYGLLSRDLFLASPNLVGCPLGIFQLVIYCIYRKKVISEKPKFADLEKNGEILKVQELIVSNINGKT

SEQ ID NO: 213 - protein, 185 aa, Aquilegia caerulea
MWVFYGLPFVTGNNTLVISINSVGLFLEVCYVVGFIYYCHTNKQRVNVGFKGIGIAVIFALAAFFELYFDKSKTTRKLVAGIQSTVFSVCLYAMPLDVMRTVIKTKSAEYMPFPLCCAGFANGIVWSIYALMSKPVDIYILIANGIGAILGAVQIMLWLVYRNGPKAGEKPTQNKAELSSEDSIV

SEQ ID NO: 214 - protein, 395 aa, Chlamydomonas reinhardtii
MGVFTEHVVPIFGNILACAMLVSPFPAVLRLRAAGKLGDINPLPYPMTVVNAAGWVAYGFAVANPYIFPANVVGFLAGVFFTFTAYAAAPKQVQDRITGIMVAASAHYIMLGLIACFALSHTAGARMWGTSAVVILMLYYFVPLSTMVQIVKTRNAASIYPPLAITAIANGLMWSIYGFAIMDINLWLPNLFGSIVGVIQLLLRLVYGAKPTAAAAGGGALAVGAGAVAADDEETAAFAKTGAEPSGAELQARLHSGTPLLGAGGVGRSCGCPAAAAAAVPVAAEATAAGEAMENGHSCGEGECRGSSGRIGSGSCLQPDGGGSDGGGGGSDRGGGGGSSCESTSSFVGGGAVCPMAPPRLVSEPQQEQDDANGADQDRDAVGAGVKAGGSDAAQ

SEQ ID NO: 215 - protein, 249 aa, Chlamydomonas reinhardtii
MGASGNMLLDTVVPGMGAVISILMYLSPLKAVLKAQREKHLGDLNPIPFSITIANCIAWLGYGLLKKDPFVCAPNAPGVLIGTYMSLTAHGLADEGAKERIRFVVCLAAAIFPFLGVYTSFFAPSAVVQQGVWGMAGNIVCLVYYAAPLSTMWDVIRTRNSSSILVPLTMMNTLNAALWTTYGVAVADPYIWAPNGIGLALSVMQIALRLVFPARAASALPSHAHHSGGSGASKYARLDEEVPLGGAGH

SEQ ID NO: 216 - protein, 248 aa, Chlamydomonas reinhardtii
MGASGNMLLDTVVPGMGAVISILMYLSPLKAVLKAQREKHLGDLNPIPFSITIANCIAWLGYGLLKKDPFVCAPNAPGVLIGTYMSLTAHGLADEGAKERIRFVVCLAAAIFPFLGVYTSFFAPSAVVQQGVWGMAGNIVCLVYYAAPLSTMWDVIRTRNSSSILVPLTMMNTLNAALWTTYGVAVADPYIWAPNGIGLALSVMQIALRLVFPARAASALPSHAHHSVEGGIDVAVIDRRVPRLRAGR

SEQ ID NO: 217 - protein, 251 aa, Chlamydomonas reinhardtii
MTAWTGRRALLDDDDEFDFKKLFLHHLAPGLGCIIAFLMFVSPLKTVLQIRANKHLGDLNPLPLVAIIANCAAWLIYGCINADPYVITANEPGLLLGIFMTVSCYGFADPKARDVMLKALMFFAVLLSAVGIAIALFIEEDETASKTAGYTAVFILLCYYGAPLSTMAEVLRSRSSASLFWPTSLMNTINGLLWVAYGTAVSDPFIAVPNAIGAAFGVIQIGLINIYPAKKVSTPPGDDVEPLIHEGRHVA

SEQ ID NO: 218 - protein, 343 aa, Chlamydomonas reinhardtii
MLISPLPAVLKLRATGRLGDINPLPYPLTIYNASGWLAYGFATSNPYLFPSNFIGFIAGVFFTLTAHSAAPRGSQDRVAGIFMVGAAHFIGMGIIALFWMSDAAADTMWGINATIILMVYYVIPLSSLWDVIKSKNAISIYIPLAIGATANGCLWTAYGFALKDFNIWFCNAFGAVIGIIQLVLRAVYGARDDSASAGLPAPPGASALVTALTRAASGGLGGGGPPVRKKTELPSEHPSAKYPGAKEGRGSSILMLLNPYTYLHSHERVPSASGGSQAMRELGAPMNAGGSAVAASGDSGGGGPSGSSAADLESRGAGMVRTVSGVAPNITSVVTSTVAGKGT

SEQ ID NO: 219 - protein, 269 aa, Lotus japonicus
MAEHFRMVVAVIGNVASVSLYAAPTVTFKRVIRKKSTEEFSCIPYIIGLLNCLLFTWYGLPVVSNKWENFPLVTVNGVGIVFELSYVLIYFWYSSAKQKVKVATTAIPVILVFCAIALVSAFNFPDHRHRKLLVGSVGLGVAVAMYASPLVAMKKVIQTKSVEFMPLPLSLCSFLASVLWLTYGLLIQDIFVAGPSLVGTPLSILQLVLHCKYWKRREMKEPINNKVELHKENMEKLDLEKGGLFETKDIEEKNVTILNNDINSKNMTM

SEQ ID NO: 220 - protein, 256 aa, Saccharum officinarum
  misc_feature (13)..(13): Xaa can be any naturally occurring amino acid
MEHIARFFFGVSXVTFWRIIGKRSTEDFSGVPYNMTLLNCLLSAWYGLPFVSPNNILVSTINGTGSVIEAIYVVIFLIFAVDRRARLRMLGLLSIVASIFTTVVLVSLLALHGNARKVFCGLAATIFSICMYASPLSIMRLVIKTKSVEFMPFLLSLAVFLCGTSWFIYGLLGRDPFIIIPNGCGSFLGLVQLILYFIYRKNKAPAAPAGKGEAAAAADVEDAKKVAAAVELADATTNKAAADTVVGDSKVVASQV

SEQ ID NO: 221 - protein, 217 aa, Saccharum officinarum
  misc_feature (217)..(217): Xaa can be any naturally occurring amino acid
MEHIARFFFGVSGNVIALFLFLSPVVTFWRIIRKRSTEDFSGVPYNMTLLNCLLSAWYGLPFVSPNNILVSTINGTGSVIEAIYVVIFLIFAVDRRARLRMLGLLSIVASIFTTVVLVSLLALHGNARKVFCGLAATIFSICMYASPLSIMRLVIKTKSVEFMPFLLSLAVFLCGTSWFIYGLLGRDPFIIIPNGCGSFLGLVQLILTLSTGKQGPX

SEQ ID NO: 222 - protein, 254 aa, Saccharum officinarum
MVSPDTIRTVIGVIGNGTALVLFLSPVPTFIRIWKKGSVEQYSPIPYVATLLNCMMWVLYGLPLVHPHSMLVITINGTGMAIQLTYVTLFLLYSAGAVRRKVVLLLAAEVAFVGAVAALVLTLAHTHERRSMLVGILCVLFGTGMYAAPLSVMKMVIQTKSVEYMPLFLSLASLVNGICWTAYALIHFDLYITIPNGLGVLFAVAQLVLYAIYYKNTQKIIEARKRKTDQVAMTEVVVDGSGRASNNNNGNTTY

SEQ ID NO: 223 - protein, 254 aa, Saccharum officinarum
MISPDTIRTAIGVIGNGTALVLFLSPVPTFIRIWKKGSVEQYSPIPYVATLLNCMMWVLYGLPAVHPHSMLVITINGTGMAIQLTYVTLFLLFSAGAVRRKVVLLLAAEVAFVGAVAALVLNLAHTHERRSMVVGILCVLFGTGMYAAPLSVMKMVIQTKSVEYMPLFLSLASLVNGICWTAYALIHFDLYITIPNGLGVLFAVAQLVLYAIYYKNTQKIIEARKRKTDQVAMTEVVVDGSGRASNNNNGNTTY

SEQ ID NO: 224 - protein, 253 aa, Saccharum officinarum
  misc_feature (151)..(151): Xaa can be any naturally occurring amino acid
MVSPDTIRTAIGVIGNGTALVLFLSPVPTFIRIWKKGSVEQYSPIPYVATLLNCMMWVLYGLPLVHPHSMLVITINGTGMAIQLTYVTLFLLYSAGAVRRKVVLLLAAEVAFVGAVAALVLTLAHTHERRSMVVGILCVLFGTGMYAAPLXRDENVIQTKSVEYMPLFLSLAFLVNGICWTAYALIRLDLYITIPNGLGVLFAVAQLVLYAIYFKSTQEIIEARKRKADQVAMTELVVDGGSKTNNHAGAGCY

SEQ ID NO: 225 - protein, 214 aa, Saccharum officinarum
RRAENFSSTVLIRFFVFIWCLASGRLLLPNGGPASKGTLSLELSTIFQKSRRQLATMVSPDTIRTAIGVMGNGTALVLFLSPVPTFIRIWKKGSVEQYSPIPYVATLLNCMMWVLYGLPLVHPHSMLVITINGTGMAIQLTYVTLFLLYSAGAVRRKVVLLLAGEVAFVGAVAALVLTLAHTHERRSKVVGILCVLFGTGMDAGPALREEKGGS

SEQ ID NO: 226 - protein, 192 aa, Saccharum officinarum
  misc_feature (192)..(192): Xaa can be any naturally occurring amino acid
MANPSFLVGILGNVISILVFASPIATFRRIVRNKSTEDFRWLPYVTTLLSTSLWTFYGLLKPHGLLVVTVNGAGAALEAVYVTLYLIYAPRETKAKMGKLVLAVNVGFLAAVVAVALLALHGGARLFAVGLLCAALTIGMYAAPLGSMRTVVKTRSVEYMPFSLSFFLFLNGGVWSVYSLLVKDYFIGVPNX

SEQ ID NO: 227 - protein, 258 aa, Saccharum officinarum
  misc_feature (13)..(13): Xaa can be any naturally occurring amino acid
  misc_feature (257)..(258): Xaa can be any naturally occurring amino acid
NVFAFVLFISPLXAPPLFLLIELSDYSQIKRTDFPPSFRPQSVPAVNARRLHCSPTFKRIVRNGSTEQFSAMPYIYSLLNCLICMWYGFPFVSYGVVLVATVNSIGAVFQLAYTAVFIAFADAKQRLKVSALLAAVFVVFGLIVFVSLALLDHQTRQMFVGYLSVASLIFMFASPLSIINLVIRTKSVEYMPFYLSLSMFLMSASFFGYGVLLRDFFIYIPNGIGTILGIVQLMLYAYFRKGSSEEAKLPLLVTHTXX

SEQ ID NO: 228 - protein, 369 aa, Saccharum officinarum
  misc_feature (1)..(1): Xaa can be any naturally occurring amino acid
  misc_feature (339)..(339): Xaa can be any naturally occurring amino acid
XDAWADASGIRSGASASAATRDSRSAAARPPWPPDPARSLLTPIKCARTRLPREPQPPFPVLASRRLTPAPFRKLRPQLAHLISRARHHPPPATEDDIPGQARNVVGIIGNVISFGLFLSPAPTFWRIWKARDVEEFKPDPYLATLLNCMLWVFYGIPVVHPNSILVVTINGIGLVIEAIYLTIFFIYSDGKKRKKAFAILAVEILFVAGVVIGVILGAHTHEKRSMIVGILCVIFGSMMYASPLTIMGKVIKTKSVEYMPFLLSLVSFLNGCCWTAYALIRFDLYVTIPNALGAFFGLIQLILYFWYYKSTPKKEKNVELPTVSRNVGGGNVTVSVEXIDDVAAAAAPPPVEKELDETYLTSSSFALV

SEQ ID NO: 229 - protein, 304 aa, Saccharum officinarum
MAGLSLQHPWAFAFGLLGNVISFMTFLAPIPTFYRIYKTKSTEGFQSVPYVVALFSAMLWIFYALIKSNETFLITINAAGCVIETIYIVMYFVYAPKKAKMFTAKIMLLLNVGVFGAILLLTLLLFKGDKRVVMLGWICVGFSVSVFVAPLSIMKRVIQTKSVEYMPFSLSLSLTLSAVVWFLYGLLIKDKYVALPNILGFTFGVVQMVLYVLYMNKTPVAVAEGKDASGKLPLTGDEHVLVNNRQASARPSPRGAPGCTQSPQMEAVPNRSCAAEAAAPPAMLPNRDVVNVFVNRHSPAVHVV

SEQ ID NO: 230 - protein, 327 aa, Saccharum officinarum
MAFLNLELQTWAFTFGILGNIISLMVFLSPLPTFYRVYRKKSTEGFQSTPYVVTLFSCMLWIFYALLKSGAELLVTINGVGCVIETVYLGMYLVYAPRAARVLTAKMLLGLNVGVFGLVALVTMVLSNGGLRVRVLGWICVSVALSVFAAPLSIMRQVIRTKSVEFMPISLSFFLVLSAVIWFAYGALKKDVFVAAPNVLGFVFGVAQMALYMAYRNKKPAAAAAVLVEEVKLPAEHASKEVVAAAAHEGSRASCGAEVHPIDIDTLTLPVVEVHDPQAVVVIDVDAAAVAAGADDGAAGVVDGPGVPTAPEQPAMIRPDMAIAVEA

SEQ ID NO: 231 - protein, 225 aa, Saccharum officinarum
  misc_feature (1)..(1): Xaa can be any naturally occurring amino acid
  misc_feature (133)..(133): Xaa can be any naturally occurring amino acid
  misc_feature (217)..(217): Xaa can be any naturally occurring amino acid
XKKDLTALRATMVISIRVIVGIIGSAVCIALYAVPMLTFKKVIKEASVGEFSCVPYILALFSTLTYSWYGFPVVSSGWENLSVSGTCLIGVLFETSFISLYLWFDPRQKRKFVMLMVSLVLAIFCVTVFTSSXIVHTHHVRKVFVGSIGIVTAISFYSSPLVAVKQVIRTKSVQFMPFYLSLFSFLASLIWMIYGILGRDPYITTPNAGGCFTGILXLAVYCIYS

SEQ ID NO: 232 - protein, 147 aa, Saccharum officinarum
MATSIRFIVGIIGSVVCVLLYAVPVLTFKRVVKEASVGEYSCVPYILALFSAFTWGWYGFPIVSDGWENLSLFGTCAVGVLFETSFVIVYIWFAPRDKKKFVVLMVSLVVAMLCVIVSLSSFMFHTHHKRKLFVGSIGIVTSMSMYC

SEQ ID NO: 233 - protein, 282 aa, Musa acuminata
MAGLSLEQPLPFIFGILGNIISFMVFLSPLPTFYRIYRKKSTEGFQSVPYVVALSSCMLLIYYALVKTNAVLLITINSFGCFIETAYITIYLIYATKKARIFCIQIFVLLNVVAFAAIVLLTRLAFTGPDRVTVVGWICVGFSLCVFAAPLSIIRLVIRTKSVEFMPFYLSFFLTLNAIAWFGYGFFTKDLYVELPNVLGFVFGVVQMVVYMLYKNNNNKKDAAVAAVPEHRVKIAELSSAPASELQVSLEEKDQNKRSMEDSQDTDKNETAYEEGHDISAV

SEQ ID NO: 234 - protein, 249 aa, Musa acuminata
MEVVRFVFGIFGNATALFLFLSPLVTFQRIIRKRSTEDFSGVPYTMTLLNCLLSAWYGLPFVSPNNLLVSTINGAGSVIEAVYVLIFLVFAPKKERARVAALFTFVLSVFAVIALVSLLALRGQRRKIFCGFAAAIFSICMYASPLSIMRLVIKTKSVEYMPFLLSLFVFLCGTSWFVYGLLGGDPFVTVPNGCGSALGAIQLILYAIYRNHTTTDGGSEMNGQGHKRLEDDSRATEKKPDHQPIADKV

SEQ ID NO: 235 - protein, 257 aa, Musa acuminata
MEVLKFLFGIFGNATALFLFLSPVVTFRRIVRKRSTEDFSGVPYNVTFLNCLLFAWYGLPFVSPNNILVSTINGTGAAIEAVYVIIFLSFAPKKVRARMAGLFALVLSIFAVIALVSLLALRGQDRKVFCGVAATFFSICMYASPLSIMRLVIRTKSVEYMPFLLSLFVFVSGTLWFIYGLLGHDPFVTVPNGCGSALGAMQLVLYAVYRKNKGGGDADGKMVEMNGEKPPKNDAVSAEKTPHHPMEEQVLECAVRR

SEQ ID NO: 236 - protein, 300 aa, Musa acuminata
MVLCHISHGDAKEFQRPLLWRLKLYTPRRYRRYIREAQKFLGLVLLCMMRISADTIRTVFGILGNGTALVLFFSPAPTFRRIWKSGSVEQFHATPYLATLLNCMFWILYGLPMVHPHSTLVLTINGSGLVIELTYVIIFLLYSERNQRLRVLLVLIIEILFVGAVAAVVLTIVHGYVRRSLVVGVLCVIFGTLMYASPLSVMKQVIETKSVEFMPLFLSLASFFNGICWTIYALIRFDLFITIPNGLGVAFAVGQLILYMMYRGSTVQQMKERKQKMEMGLVNTNGSLKDDLENGTKIGN

SEQ ID NO: 237 - protein, 252 aa, Musa acuminata
MVVSADTFRTVVGIIGNGTALVLFLSPAPTFHRIWRSGSVEQFHATPYLATLLNCLFWILYGLPMVHPHSTLILTINGSGLVIELVYVLIFLRCSDGARKLRVFSVLLAEILLVGAVAAVDLTLVHGYQRRSLIVGVLCVVFGTVMYAAPLSVMQQVIKTKSVEFMPLSLSLASFLNGVCWTTYALIRFDLFITIPNGLGVAFAVAQLVLHMMYHASTKQQIKERKMKIEMGLAKPNGSLKEDLEAGSRNGS

SEQ ID NO: 238 - protein, 276 aa, Musa acuminata
MITCLQTPTEKRWERSRLFLLLVAREREKKKKKKGKMIPSGIAAASSSSASFYDICSYAAGIAGNVFAFVLFVSPMPTFKRIVQNKSTEEFSGLPYIYSLLNCLICMWYGLPCVSYGVILVATVNSVGAAFQLVYVILFIRYANSARKLRMSALLAGVACVFAAIVFVSLEFFDHTTRQTFVGYLSVASLISMFASPLSIISLVIRTKSVEFMPFYLSLATFLMSISFFAYGMLLHDFFIYLPNGIGTFLAVIQLVLYAYYSINSREDSNMPLLVS

SEQ ID NO: 239 - protein, 260 aa, Musa acuminata
MVSADAIRTGVGILGNAIALGLFLSPVTTFVRIWKKGSVEQFSPIPYVATLLNCMMWVVYGLPMVHPHSMLVITINGSGLAIELSYVLLFLVYSHGSKRLKVLLMLLAETAFVAAVALLVLTLAHTHERRSMIVGVLCVFFGTMMYAAPLSVMRLVIQTKSVEYMPLFLSLASFFNGVCWTAYALIRFDPYITIPNGLGVVFSVAQLMLYATYYKSTQRQIEAVKRKTEMGLTDVVVVKGDANKAGSVPFAGGNPEIRAM

SEQ ID NO: 240 - protein, 240 aa, Musa acuminata
MISSDFAAASSSTSSFYGFCTYAAGIAGNVFAFVLFVSPMPTFKRIVRNKSTEQFSGLPYIYSLLNCLICMWYGLPWVSYGVILVATVNSIGAAFQLAYVSLFIRFADSAKRLRMSGLLIGVFSVFALIIYASLELCDHPTRQIFVGYLSVASLISMFASPLFIINLVIRTRSVEFMPFYLSLATFLMSISFFAYGMLLHDFFIYIPNGIGTVLGVVQLLLYAYYSKSVEESHLPLVASH

SEQ ID NO: 241 - protein, 351 aa, Musa acuminata
MAGLSLQHPLPFAFGMLGNLISFMVFLAPIPTFYRVYRKKSTEGFHSVPYVVALFSCMLWIYYAFVKTNSMLLITINSFGLFIETIYITIYLIYAPKKARIFCIQIFVLLDVVAFAAIVLLTQLVFKGSNRVTVLGWICVGFSISVFAAPLSVIRLVIRTKSVEFMPFFLSFFLTLSAIAWFGYGLFTKDIYVQLPNVLGFVFGIAQMLLYIIYKKKKNVSIEENDRKKKANEDAEGVDNGKTAAAAAAEEGIEINAVLCVRLLISPEEKQTSVVCPCIIIAIIKCLPFLSAINRIHTSAIYLNSTFCERRHLLPLSWKNKEADATSSLGEERCIELADEGDKCLVALSQC

SEQ ID NO: 242 - protein, 262 aa, Musa acuminata
MVSADAIRTAVGILGNAIALGLFLSPVPTFVKIWKKGSVQEFSPIPYVATLLNCMMWVVYGLPMVHPHSMLVITINGSGLVIELSYVLLFIVYSSGGKRLKVLVMLLAETAFVGVVALLVLTLAHTHERRSMIVGVLCVFFGTMMYAAPLSVMKMVIRSKSVEYMPLSLSLASFFNGVCWTAYALIRFDPYITIPNGLGVMFAVAQLVLYAMYYKSTQRQVEAKKRKAELGLTEVVVVKGDANKIVSVPINGGGSNAENRDM

SEQ ID NO: 243 - protein, 235 aa, Musa acuminata
MVMSQQAIRSVLGVIGNIISFGLFLSPVPTFIRIIKRKAVEDFSPIPYLATVLNCMFWVFYGLPIVHPNSILVVTINGIGLILEAIYLVIFLVYAPRQGRLKVSKILAAEVSFMTVVVVVVLLTAHTHEKRSLIVGIFAIIFGTCMYASPLSVMKMVIQTKSVQYMPFTLSLASFLNGVVWTSYAFLPFDINLVIPNGLGALFGLAQLILYACYYKSTPKAGTKAEVELPTASNV

SEQ ID NO: 244 - protein, 282 aa, Musa acuminata; identical to SEQ ID NO: 233

SEQ ID NO: 245 - protein, 234 aa, Musa acuminata
MLSQDAVRNVIGLIGNVISFGLFLSPVPTFVQIIKKKAVEQFSPIPYLATLLNCMMWFLYGLPIVHPHSILVVTINGIGLVIESAYLSIFFIYATREGRLKVLKILAGELAFMAVVVVAVLLAAHTHEKRSLIVGILCIIFGTCMYASPLAVMKLVIQTRSVEYMPFTLSLASFLNGVCWTTYSCLPFDINLFIPNGLGALFGFLQLILYACYFKATPKKDAKAEVELHSARDV

SEQ ID NO: 246 - protein, 281 aa, Musa acuminata
MAGLSLQHPLPFTFGMLGNLISFMVFLAPIPTFYRVYRKKSTEGFHSLPYVVAVFSCMLWIYYAYVKTDSILLITINSFGVFIETAYITIYLIYAPKKTRIMSMRIFVLLNVVVFAAIILLTQLLFTGSIRLKVLGWICVGFSVSVFAAPLSVIRLVIRTKSVEFLPFYLSFFLTLSAIAWFGYGLFTKDIYVQLPNVLGFLFGVAQMVLYIVYKKKKNVVVEPAGIEHIVRIAELAIAPASELQAGVEENDHRKKASEGSTEGVEKAKMAAEEGIEIDAV

SEQ ID NO: 247 - protein, 336 aa, Musa acuminata
MSYFNRPDRRDLIPPPSPLYMNVCHWPWGLEISPRCCVLLLGKMVVSADTIRTAVGIMGNATALVLFFSPAPTFCRIWKSRSVEQFPATPYLATLLNCMMWVLYGLPMVHPHSTLVLTINGSGLVIELIYVLVFLGCSHGDQRLRVLLVLLLEIAFVGAVGALILTLVHSHERRSLIAGVLCVIFGAAMYAAPLAAMRQVIRTRSVEFMPLPLSLASFVNGLCWTTYATIRFDLFITIPNGLGVAFAVAQLALHAVYHGSTARQKKGGRREAEIGLVKPNGRSLEEEVAKGIRVESGVISVEETNKSSMGTNKNLESVSCSSLRSLSLSLYVKPIT

SEQ ID NO: 248 - protein, 275 aa, Musa acuminata
MAAGLSLDRPWAFTFGILGNIISFMVYLAPLPTFYRVYKRKSTEGFQSVPYVVALFSAMLWISYAFLKTDACLLITINSVGCAIETVYIVYAPKATKIFTAKLVLLVIVAMFGLILLLTLLLSEGAKRVEILGWICVSFSVSVFVAPLSVIRLVIRTKSVEFMPFSLSFFLTLSAVVWFAYGLLIRDLYVSLPNVLGFIFGILQMALYVAYKDRKKAAVVEQEPPEHVLPITNRDTAQKAVEVHRTVETHGEDKVGDGDQKEIDENKEVMASVEV

SEQ ID NO: 249 - protein, 296 aa, Musa acuminata
MNSAFTHCGEPIGSNVAKLGVCPRLFIYVLHLSTLLSIFFLSLHVINCWSVSLVGNVISVLVFASPINTFRRIVRNRSTEDFEPSPYVITLLNSSLWVYYGITKPGGLLIVTVNGVGVVMEAVYVALFLLYAAPPLKAKTAVLVAALDVGFFGAVALVTRLAVHGSSRVVVIGFVCAFLNVLMYGSPLCAMRSVITRRSVEYMPFLLSFFLFLNGGIWTLYAILDKDIFIGIPNGIGLILGTSQLIMYMIYMNSEASNLSGESYQESQQQRLIQYIYIYIYIYIYIYNPENAFTSD

SEQ ID NO: 250 - protein, 334 aa, Musa acuminata
MAGLSLDHPWAFTIGILGNIISLMVFLAPLPTFYRVYTRKSTEGFQSVPYVVALFSCMLWFCYAFLKTDAYLLITINSIGCAIETVYIVIYLTYAPKVAKIFTAKLVLVVNVGMFGLILLLTLLLAEGSKRVGAFGWICVSFSVSVFVAPLSVIRLVMRTKSVEFMPVSLSFFLTLSAIVWFAYGLLTKDIYVGLPNVVGFIFGILQMVLYVAYRDKNRVAIEHKLPEHIISIAKLSAEKASEIYPIDSATPVVHDQDTVQEQGGGAEEAKGGMAAPQRENETNSVEPHKCSLVLSVISFGYLTLVYCELMRCYSIDFSTVMFYLRDPMFGCRL

SEQ ID NO: 251 - protein, 281 aa, Musa acuminata
MAGLSLDHPWAFTFGILGNIISFMVYLAPLPTFYRVCRRKSTEGFHSVPYVVALFSATLWIFYAFLKTNAGLLITINAVGCVIETAYVVVYFTYAPKAAKMFTAKLVLLVNVGMFGLILVLTLLFARGAKRVEVLGWICMSFSVSVFVAPLSIIRLVIRTKSVEFMPFSLSFFLTWSAVVWFGYGLLTKDLYVALPNVLGFIFGVLQMVLYVAYRNKDKAMVEQKLPEHIASKLGTAEKVLEIYAIGVEEKVPNRAQEEQEEDKQGVAAAPMEKKMKPAEV

SEQ ID NO: 252 - protein, 288 aa, Musa acuminata
MAGLSLDHPWAFTFGILGNIISFMVYLAPLPTFYRVYRGKSTEGFQSVPYVVALFSAMLWVLYAFLKTDAFLLITINSFGCVIESVYVVLYFTYAPKLAKILTAKLVLVLNVGMFGSILLLTLLLPDGLKRVRVLGWICMCFSVSVFVAPLSIIRLVIRTKSVEFMPFMLSFFLTLSSIVWFAYGCLTKDKFVALPNVLGFAFGLLQMGLYLAFKCMKPTAVEPRLPEHIISISMLGVEVYPIDWKTPEVNDEEKAENGDRKEADTGEEKVEGMAAPHEENEVNHVDV

SEQ ID NO: 253 - protein, 243 aa, Musa acuminata
MTYWSVNLAGNIISVLVFASPIKTFWRIARSGSTEDFESAPYVVTLLSSSLWVYYGITKPGGLLVATVNGVGVVMEAVYVTLFLLFATPQLRAKTAVLVAALDVGFLGAVVLVTSLAVHGSLRVMVIGTICACLNVFMYGSPLAAMKTVITTKSVEYMPFFLSFFLFLNGGIWIVYAILDKDIFLGIPNGIGLILGTIQLILYLIYVNAKASKQLGDSHEEEWQHQQLINSNSEHEADEEAHI

SEQ ID NO: 254 - protein, 333 aa, Musa acuminata
MESLLLHRILPFAFGILGNIVSLMVFLSPILTFYRIYRNKSTGEFQSTPYVFSLFSCSLWIYYALVKTHSVPLITNNAFGCLIEATYITMYLIYATKKARIFTIRVFVLVNVVAFAAILLLTQPLITGTKRVTVLGWICVAFSLSVYAAPLGIMMRVIRTRSVECMPFNIPLFHMLSAIAWFGYGLFTDDVYVELPNVPGFVIGVGQMVLYAIYRKKSGAVVDAAEHEVKVAQPTPSPASVRQHIVRIAEHVVRMVELDPTLDSEPQVIAGENDREKKKKIDVAEPPLISTPELDNHDDKKKKAKEENDMGVKKPRIVVEHIINIRELISVVA

SEQ ID NO: 255 - protein, 261 aa, Musa acuminata
MRKGMTFFFCFCSPSTGNIISFLVVLAPVPTFYRIYKKKSTESFDSVPYVVALFSAMLWVFYGLLTLDVLLLTINTGACIIEMIYLTIYLIYASKKPRAFTLKLISLVNVGIYGSLVLFTTLFVKGKRRIDVTGWICASFAVSVFAAPLSIIRLVIRTKSVEYMPFSLSFFLTLSAVAWFSYGILLGDLFVALPNVVGFMFGIAQIIIYFMYVNSKKAETKPKLNAEAMPAAATLDSVVELPEKKGVPQPVVCEFTSVIEV

SEQ ID NO: 256 - protein, 204 aa, Musa acuminata
MADVSFFVGILGNVISILVFASPIGTFRRIVKTKSTESFKGLPYITTLLSTSLWTFYGLLKPGGLLVVTVNGVGTVLQAIYIILFLIYAPNDTRAKMAKLVGMLNVCFFGAVVVVTLLSVHASMRLLVVGFLCAALTVGMYASPMAAMSTVVKTKSVEYMPFFLSFFLFLNGGVWSIYSVLVRDFFIGVPNAIGFALGSAQLVL

SEQ ID NO: 257 - protein, 274 aa, Musa acuminata
MSIEMNFESIEMRLVSMFGDISFICNGFFCFLPCAGNILSFLVVLAPMPTFYKIYKKKSTEEFGSVPYMVGLFSAMMWIYYGALTMDFLLLSINVGASLIETAYLILFLIYAPAKPRAFTLKLVSLFNVGAYGSVVLFTMLFLRGGRRTNIAGWICASFAFSCFVAPLSIIKQVIRTKSVEYMPISLSFFLTVSAIAWLSYGLLLGDLHVALPNVVGFLFGVAQIIIYLVYKNAKKDDTKTKLGNQPAEAMATAVTSGSDIELPEKLSTPQAEV

SEQ ID NO: 258 - protein, 253 aa, Musa acuminata
MKTPKRRKRDQATIACLASNWSMHIHLRHDRKLLSSSLARERLYAYDTLLSNSGSTLLLVAASMTTWKFAGNIISFVVYLAPVPTICKIYQNKSAEGYSSLSYNLSLFSCLIWVYYAHLKPNSVLLISINAIGCIILTCYITIYLVFATRKDRISTIQVFVALNLVTFIGILFLTLLLFSGTNRLTVLGWICVGFSISVYAAPMSTIRRVVRTRSVEFMPVNVLVCLTLSAAIWFGYGVFTKDAFISVIITST

SEQ ID NO: 259 - protein, 177 aa, Musa acuminata
MPSPSVCSSPVCNLLCLFPFLSGVSVRTQKVPIAMFGRCYCDACRPTFKNIIKKKAVEQYLPIPELTILFKCMLWVLYGLPIVHPNSCLVLTSNAIGLFLQAVYLTIFLIYAAREIRLKVLKVLAAELVVMTMLVVVVLQVAHTHEKRSLIVGIPCVIFGSCMYAAPLAFLVRPDFS

SEQ ID NO: 260 - protein, 250 aa, Manioth esculenta
MDVLHFLFGVFGNATALFLFLSPTITFKRIIKSKSTEQFSGIPYVMTLLNCLLSAWYGLPFVSKNNLLVSTINGTGAAIEIVYVLVFIVYAPRKEKSKILGLLTLVLAIFATVAFVSLFALHDNSRKLFCGFAATIFSIIMYASPLSIIRLVIKTKSVEYMPFFLSLFVFLCGTSWFIYGLLGRDPFVAVPNGFGCGLGTLQLILYFIYRKNKGEDKDAAATKQSVEMGSSEKPQQEKKMMANGSADEQV

SEQ ID NO: 261 - protein, 250 aa, Manioth esculenta
MDVLHFLFGVFGNAAALFLFLSPTFTFKRIIRSKSTEQFSGIPYVMTLLNCLLSAWYGLPFVSKDNLLVSTINGTGMVIETIYVLIFLIFATRKEKGRILGLLTLALAIFGTVAFVSFFALQGNTRKLFCGLAATIFSIIMYASPLSIIRLVIRTKSVEFMPFFLSLFVFLCGTCWFIYGLLGRDPFLAIPNGFGCGLGAIQLILYFIYRKNKGEEEPVKKPTSQSMEMSSAKPQQEKKIWANGSPDEQV

SEQ ID NO: 262 - protein, 234 aa, Manioth esculenta
MIDYIPNSTLTCKDAAGIAGNIFAFGLFVSPIPTFRRIIRNRSTEQFSGLPYIYALLNCLICLWYGTPLISNDNVMVATVNSIGAVFQLAYIILFIVYAEKAIKVRVFGLLLAVFGLFAIIVTGSLQITDGNIRWITVGLLSCISLISMFASPLFIINLVIRTKSVEFMPFYLSLSTFLMSTSFLLYGILNFDAFVYVPNGIGSILGITQLALYFYYKKKSTEDSREPLIEPYA

SEQ ID NO: 263 - protein, 188 aa, Manioth esculenta
FSGLPYVYAFLNCLICLWYGLPIISPGIILVATVNSIGAVFQLIYISIFIWYADNSRKLKMSGLLVAVVAAFGVIAFVSMAFFESHARQIFVGYLSVFSLISMFASPLCVINLVIKTRSVEYMPFYLSLATFVMSLSFFAYGMLKFDPFIYVPNGIGTILGICQLVLYSYYSSKYGEDSSEPLLAPYA

SEQ ID NO: 264 - protein, 247 aa, Manioth esculenta
MGDRLRLAVGMMGNAASLLLYAAPVLTFFRVIRKKSIEKFSCVPYICALSNCLLYTWYGLPVVSCKWENFPLVTINGLGILLESSFIIIYLVFAETRGKIKVGVTLLLVLLIVSITAGVSSFALRDHHSRKVLTGSVSLVGSVGMYGSPLVVMKQVIQTKSVEFMPFYLSFFSFLSSSLWLVYGLLGRDLFVASPNFLGTPLGILQLLLYCKYRKRSVMEVPQKCDLEKNEVNSKQLQLVVDEELKN

SEQ ID NO: 265 - protein, 224 aa, Manioth esculenta
LTFTRVVRKRSTEEFSCIPYIITLLNCLLYTWYGLPVVSYKWENFPLVTINGLGILLEISFIIIYFRFAETRRKIKVGVTLLPVLLLFSIVAAVSSFAFHDHHSRKIFTGSVGLVVSVGMYGSPLVVMKQVIQTKSVEFMPFYLSFFSFLASSLWLAYGLLSHDLFIASPNFLGAPLGILQLLLYCKYRKRGVMEEPQKWDVEKNEDKSKQLQLVVNDDTNGKS

SEQ ID NO: 266 - protein, 194 aa, Manioth esculenta
MNCLFWVFYGLPIVKPDSILVVTINGIGLVMELIYLAIFCLYDKGKKGRVQVASWLAVEVVFLAGLVLATLLGFHTHAKRTLFVGIFCDVFNVMMYTSPLAIMKKVITTKSVEFMPLSLSLANFANGCIWTAYALIKFDLFILISNGLGALSGAVQLILYARYYSTTPKRSKDKADVVKASEIQLSGSNAECRA

SEQ ID NO: 267 - protein, 238 aa, Manioth esculenta
MVDTATVRTIVGVIGNIISLCLFLSPIPTFLKIVKQQAVQEFKPDPYVATLLNCALWSFYGLPFVKEDSILVTTINSVGLIIEIVYVCIFFMYSPMEKRRKIVMVLTLELIFVFAVVLVAFLAFPTPKKRAIFVGILCVILNIIMYASPLTVMRMVIKTKSVKYMPFFLSLANLCNGIIWVIYAMLKFDINVVLPNSLGAISGMIQIFLYAKYYKTTQWDNDEDNSRYKHEVEISSAV

SEQ ID NO: 268 - protein, 260 aa, Manioth esculenta
MVSSDTARNVVGILGNVISLFLFLSPVPTFVQIWKKRAVEQYSATPYLATLVNCMVWVLYGLPMVHPKSLLVVTINGSGTAIEFIYIILFIIYADKKKRVKVILIVLIEIIFIAAVAVLVLTLAHTTKKRSMIVGLVCICFNIMMYASPLSVMKLVITTKSVEYMPFFLSLASLGNGLAWTTYALIHFDPFIVIPNGLGSLFAVGQLVLYAVFYKSTKRQIAEREGKAEVGLSQIVVNGDSKKKPSTASLNASASEINRA

SEQ ID NO: 269 - protein, 259 aa, Manioth esculenta
MVSSDTARNLVGILGNIFALSLFLSPVPTFVQIWKRKAVEQYSATPYLATLVNCMAWVLYGLPIVHPNSLLVVTVNGAGTVIEFLYIIVFIIYSDKKKRVKVILIVVVELIFIAALATMVLNLAHTTKKRSAIVGFICIFFNIAMYASPLSVMKMIITTKSVEYMPFFVSLTSFINGLAWTCYALISFDPFLLIPNGLGSLFALAQLTLYAVFYKSTKRQIAAREGKSELPLAQVLVNEDSKRAATAPLNGSASETNRA

SEQ ID NO: 270 - protein, 171 aa, Manioth esculenta
MASAGFIFGIIGNIISFFVFTSPIKTFWEVVKNKSTEDYEAFPYITTLLGTSLWTFYGCLKPGGLLVVTVNGIGASFQLVYVTLFLIYAPKKRKVKAAKLVALLNVGFLGAVIAVTLLAMHGKLRITFVGLICVGMATIVYGSPLSALVVNDHFTNFIQEYNILESFILNS

SEQ ID NO: 271 - protein, 302 aa, Manioth esculenta
MADLSFIVGIIGNIISILVFASPIKTFWTVVKKKSTENYKGVPYITTLLSTSLWTFYGLLNPDGLLVVTVNGAGAVFQFIYVTLFLIYAPKDKKVNAAKLVALLDVGFLGVVITVTLVAMHGNLRLTFVGILCAAFTIGMYAAPLSAMRTVIKTKSVEYMPFLLSFFLFLNGGVWSVYAVLVKDFYIGVPNATGFVLGSAQLILYAMYTKKSGSEKSAMEEEGSPHLVKGGIEMRTHNDEDDKMCINNRSLNKGKSLPKPTVNRQNSLKKILKTLSLNVQDLQSGWLHDIELGNRKPDNDQP

SEQ ID NO: 272 - protein, 251 aa, Manioth esculenta
MASISFIIGVIGNIISFFVFTSPIKTFWEVVKKKSTGDYEVFPYITTCLGTSLWTFYGLLKPGGLLVVTVNGAGAFFQFIYVTIFLIYAPKDKKVRAAKLVGLLNFGFLGAVIAVTLLAMHGKLRLTFVGLICVGMTTIVYGSPLSVMKTVIKTRSVEYMPFLLSFSLFLNASIWLIYAAVVRDYYMTIPSVLGVVLGIVQFILYAIYSKQPKSTKSTDEMQAKGSDNVVKGDLEMQVGNSKGGDCQCNHN

SEQ ID NO: 273 - protein, 226 aa, Manioth esculenta
MEFLTHEELAFIFGLLGNIISFLVFLAPVPTFYRIYKKKSSEGFQSIPYLVALMSAFLLLYYGSVKDKAYLIISINAIGCAIELIYIILYLIYASKEERIFTAKLVVVFNIGGCGMMMVCTMLLAKGSKRVTIVGWICAAFAIAVFAAPLSIMRRVIKTKSVEFMPLPLSFFLTLSAIAWFFYGFLIKDFFIALPNILGILFGLVQMGLYMLYKNSSKQQDDGTKE

SEQ ID NO: 274 - protein, 280 aa, Manioth esculenta
MALHLSLDFVFGVLANIISAMVCLAPLPTFYQICKKKTSEGFQSIPYVIALFSAMLWLFYAIFDEDSTLLITINSFTFFMETGYLTVYLIYATKKDRMFTTKLILFFNIFGFGMIAILTLFLTHGRKRVDVLGWICMIFALCVFVAPMGIMRKVIKTKSVEFMPFSLSFFLTLTAVMWFFYGFLKKDLYVAIPNTLGFLFGIVQMVLYLIYRNPKKLPVEDPKLRELSEHIVDVAKLSATLCSEITTVVVPQPIDNGNDVGGQKIKEETEQDIGTPADKV

SEQ ID NO: 275 - protein, 225 aa, Manioth esculenta
MLWLFYALFDGNSTLLVTINSFTFFMEIGYITVYIIYATKKDRMFTIKLLLFFNVFGFGMISIFTLFLTHGRQRVDVLGWICMIFALCVFVAPMGIMRKVIKTKSVEFMPFSLSFFLTLTAVMWFFYGFLKKDLYVAIPNTLGFLFGIAQMVLYLIYRNPKKLPAEEPKLSELSDHIVDVAKLSAICSEINTVAVPQLNDNGNNVGDQKIKEETEKTNLELDVVV

SEQ ID NO: 276 - protein, 281 aa, Manioth esculenta
MALHFTMAFAFGLLGNIISFLVCLAPMPTFYKIFKKKTSEGFQSLPYVIALFSAMLWLFYAIFANDATLLITINSATFLMETAYIVIYLFYASKKDRILTTKLVLLFNVFGFGLVFVIAMFLTHGKERVKVLGWICMVFALCVFVAPLGIVRKVIKTKSVEYMPFALSFFLTLSAIMWFFYGFLKKDVFVAIPNILGFIFGILQMLLYVIYRKPKNTLEKPTLDEISEHVIDVAKLSANACSEISSAVVAPENISNDNVQGNHVMEQPKQINPDKDLSDTV

SEQ ID NO: 277 - protein, 279 aa, Manioth esculenta
MALHLTWAFVFGLLGNIISSLVCLAPVPTFYQICKKKTSEGFQSIPYVIALLSAMLWLFYAVFAEDATLLITVNTFTFLLEIAYLALYFFYATKKDKILTAKLVFLFNVFGFGIISIVAMFILHGKQRVNVLGWICMIFALCVFVAPLAIVRKVIKTKSVEFMPISLSFFLTLSAVMWFLYGFLRKDYFVAIPNVLGFIFGMLQMLLYAIYRKPRKSLEKPTLNNESFEHVIEVAKLGAEACCELNTEAKDENDHEAEDKHVKEQPKQINQDNDLSDTV

SEQ ID NO: 278 - protein, 282 aa, Manioth esculenta
MALHLPWGFIFGLLGNVLSCMVCLAPAPTFYQIFKKKTSEGFQSLPYVIALLSAMLWLFYAVFAKDATLLITVNSFTFLLEIAYLTLYFFYATKKDKILTTKLVFLFNVLGFGSISIVAMFILHGNQRVNVLGWICMIFALSVFVAPLAIVRKVIKTKSVEFMPISLSFFLTLSAVMWFLYGFLRKDYYVAIPNVLGFIFGMLQMLLYAIYRKPRKSLEKPTLGESSEHVIDVSKLGANTCCELNTEVAAPKNENDHEEVDDNHVKEQPKKINEDKDLSDTV

SEQ ID NO: 279 - protein, 284 aa, Manioth esculenta
MAVFSTHNPFVFAFGILGNIASFVVFLAPVPTFVRIYKKKSTEGFQSFPYAVALFSAMIWLYYAWLKSDAFLLITINSAGCFIETIYITLFIAYAPKQARIFTLRILLLLNLGGFCLVLLLSHYLAKGSSRVRILGWVCVVFSVSVFAAPLSIMRVVIRTKSVEFMPFYLSFFLTLSAITWLFYGLLLKDYYIAVPNVLGFLFGVCQMILYVIYKNLKTVVEEPKLPETNKDNEILSTCGVEEAVSSELNGHENGENMKEQQEEYNGNKDMRGSNGDQLIGCQA

SEQ ID NO: 280 - protein, 174 aa, Manioth esculenta
MLLLLNFGGFCLILLLSHFLAKGSSRVRILGWVCVIFSVSVFAAPLSILRVVIRTRSVEFMPFNLSFFLTLSAIMWFFYGILLKDLYVAIPNVLGFIFGVLQMILYVIYKNFKTAEEPKLPEHTIDNAKFSTSLTCGIQEAASPQLNGADKEENIHEKQDMDDPNGDQPIVCQV

SEQ ID NO: 281 - protein, 161 aa, Manioth esculenta
MLLLLNFGGFCLILLLSHFLAKGSSRVRILGWVCVIFSVSVFAAPLSILRVVIRTRSVEFMPFNLSFFLTLSAIMWFFYGILLKDLYVAMILYVIYKNFKTAEEPKLPEHTIDNAKFSTSLTCGIQEAASPQLNGADKEENIHEKQDMDDPNGDQPIVCQV

SEQ ID NO: 282 - protein, 278 aa, Manioth esculenta
MDMAHHPWIFTFGILGNIISIIMFLAPLPTFLRVYRKKSTEGFHSIPYVVALFSAMIWIYYATLKPGTDFLLLTINSVGCLVETIYIVVYIVYAPKQARILTLKLLLVMNIGGFCAIVLLTHFFAKGSTRLHIVGWFCVAFSAVVFAAPLSVMRLVIRTKSVEFMPFTLSFSLTLNAIMWLLYGILLKDLYIALPNIFGVILGIFQMTLYAIYKDGRKVIQKQNESEINKINCEVHAVSVPICEESEVGNKHENSYDHHHHTKPNGDSIESHNPSPTK

SEQ ID NO: 283 - protein, 239 aa, Manioth esculenta
MAVMSTHHPLAFAFGILGNIISIMVYLAPMPTFFRIYRKKSTEGFQSLPYLVALFSSMLWLDYAMLKKDAFLLININAFGCFIETVYIVLYIIYASKENRISTFRLLLSMNMGLFSFIILFTHFVMKDSVRVQVLGWICVAVSVSVFAAPLSIVAQVIKTRSVEFMPFNLSFFLTISAIMWFAYGLSTKDLCVALPNVLGFILGLLQMLLYAIYRKANKVIMEEKLQENLKTIVILSSE

SEQ ID NO: 284 - protein, 263 aa, Manioth esculenta
MAVMDTHHPLAFTFGILGNIISVMVYLAPMPTFLRIYRKKSTEGFQSLPYVVALFSSMLWLHYAMLKGDAFLLITINTFGCVIETIYIILYITYATKENRISACRLLLSLNMGLFSFIVIITHFAVKYSVRAQVLGWICVAVSVSVFAAPLSIVAQVIRTRSVEFMPFNLSFFLTISAIMWLAYGLSTKDLCVALPNVLGFILGILQMLLYAVYRKAKKVVMEEKLQEHLKTIVILNTLGNSESSSHKGSLYILYTLSFTWMY

SEQ ID NO: 285 - protein, 241 aa, Manioth esculenta
MEILSLVFGVIGNVISVLMFLSPARTFWRIVKRKSTEDFDSLPYICTLLNAALWTYYGIIKPGAFLVATVNGFGILVEIVYVTLFLVYAPPKMRAKTSILVGILDVGFLAAAVLVTGLALHGQVRINVTGFMCSGLNILMYGSPLAAMKTVISSKSVEYMPFLLSFFLFLNGGIWSLYAFLTSDYFLGVPNGAGFLLGAAQLVLYAIYRNGSNISDGLEEGWQYQTLISSSSSQQSHEINN

SEQ ID NO: 286 - protein, 237 aa, Manioth esculenta
MEILSLLFGVIGNVISVLMFLSPAGTFWRIVKHGSTEEFESLPYVCTLLNAALWTYYGIIKPGAFLVATVNGFGILVEIVYVTLFLIYAPLKMRAKTWILLGLLDVGFPAAAILVTRLALQGQVRIDATGFMCAGLNIVMYGSPLAAMKTVVTTKSVEFMPFLLSFFLFLNGGVWTLYAFLTTDYFLGVPNGAGFLLGAAQLVLYAIYRNAKPSRNVSDGLEEGWQYQNLISSPSSE

SEQ ID NO: 287 - protein, 250 aa, Manioth esculenta
MASSTSSSMDGIIIFLGLLGNITTGLVYLAPIKTFWRIVMNRSTEEFESDPYVWKLINAYFWVYYGVLKPHSVLVATVNGFGAVLELIFVTLFLIFAPPRMRVKTAILFGFLDVVFPAGTVLITQLFLKRKAQIDVAGFFCVCFSMAAYGSPLSAMKTVVTTKSVEYMPFLLSFFLFINGGVWTLYAVITRDWFIGLPNGTGFVLGTAQLILYAIYYKRPQQLKKSSDNLEDGWERQPLIPEADQATPKA

SEQ ID NO: 288 - protein, 271 aa, Manioth esculenta
MAVLDHRLVLVFGLLGNALSFLVYLAPLPTFYKIFKKKSTQEFQSLPYSVALFSAMLMLYYASLKNDAFMLITINAVGCFIETIYLVIYMIYATKISRIYTLKLLISFNLVTCAMIIVLTSLFSHGAERMNIVGWICVVFSVSVYAAPLSIMRFVVKTKSVEFMPFSLSLALTLCAACWFGYGLAVDDYFIASPNVLGFLLGLVQMIIYMIYKNKRNEILPQTNSQELASCGHQMKNNGNPNDASLNKPEEAAMDGENKSNKAVESSELHV

SEQ ID NO: 289 - protein, 233 aa, Cucumis sativus
MVLLGSIFSICRDAAGVAGHIFAFGLFLSPLDTFRRVIRNKTTEQFSCLPYIYALLNCLICLWYGTPLISPRNTMVMTVNSIGAVFQLVYIMLFITYAEKGKKIKMLGLLLGIFGLFIVIVIGSLQIADLSLRRNVVGILSCASLVSMFASPLFIINLVIRTKSVEFMPFYLSLSTFLMSISFFLYGLFNYDLFVYAPNGIGTLLGSVQLVLYCYFSRVAREESREPLIVSYA

SEQ ID NO: 290 - protein, 215 aa, Cucumis sativus
MVLLGSIFSICRDAAGVAGHIFAFGLFLSPLDTFRRVIRNKTTEQFSCLPYIYALLNCLICLWYGTPLISPRNTMVMTVNSIGAVFQLVYIMLFITYAEKGKKIKMLGLLLGIFGLFIVIVIGSLQIADLSLRRNVVGILSCASLVSMFASPLFIINLVIRTKSVEFMPFYLSLSTFLMSISFFLYGLFNYDLFVYVSIILPISVVHCAFTPFIM

SEQ ID NO: 291 - protein, 252 aa, Cucumis sativus
MDIPHFLFGVLGNATALFLFLSPMVTFKRIIRSKSTEEFSGIPYVMTMLNCLLSAWYGLPFVSPHNILVSTINGTGAVIELIYVMVFIIYAPKKEKGKIGGLFGFAMGAFTAVALVSVFALEGKIRKLFCGLAASVFSIIMYGSPLSIMRTVIKTKSVEYMPFLLSLFVFLCGTSWFIYGLLGRDPFVAVPNGFGCGLGALQLILYFIYRAPRPAPDEKPTNNDGPNMEMGLHKPQLDKPQATAKVDRDDQV

SEQ ID NO: 292 - protein, 195 aa, Cucumis sativus
MDIPHFLFGVLGNATALFLFLSPMVTFKRIIRSKSTEEFSGIPYVMTMLNCLLSAWYGLPFVSPHNILVSTINGTGAVIELIYVMVFIIYAPKKEKGKIGGLFGFAMGAFTAVALVSVFALEGKIRKLFCGLAASVFSIIMYGSPLSIMRTVIKTKSVEYMPFLLSLFVFLCGTSWFIYGLLGRDPFVAVSISFP

SEQ ID NO: 293 - protein, 249 aa, Cucumis sativus
MEPLPIFVGVIGNIISILFFISPIKTFWRVLKKRSTEEFDSLPYVSTFLTASLWAYYGLIKPDGFLIVTVNIFGLSLQICYLTIFLLFSPPHMKVRTTTLVAIFDVGFVGGTISISYFMLHGNSRINVIGFICAALNIINCGSPLGIARKVVRSKSVEYMPFLLTLCIFLNSGVWTFYALLVKDPFIGVPNFIGFLLGLMQLVIYVIYMNGPQPSHIPISYNKEDTSLLHEHLLPPPSETTLSSKINQS

SEQ ID NO: 294 - protein, 193 aa, Cucumis sativus
MVNTETARTVIGIIGNVISFGLFMSPIPTFVKIIKHKAVEDFKPDPYLATILNCAMWVFYGMPFVHPDSILVVTINGIGFFIEAVYVSIFFIYSPWAKKKKMMVILLIETIFFAVVVVITLLVFHTTTTRTYFVGILCIIFNIGMYTSPLTVMRLVIKTRSVKYMPFTLSLANFCNGIVWAIYAILKFDPNVL

SEQ ID NO: 295 - protein, 269 aa, Cucumis sativus
MVSLVLARTVIGIIGNIIALFLFLSPLPTFVTIWKRGSVEQYSPIPYLATLVNCLVWVLYGLPVVHPGSILVITINAAGTLIELVYIILFFVFSDRKKRMKVLLVLLIELVFITVLTLLVLFIFHTHSKRSMVVGTICILFNIGMYASPLAVMVCFVFVMQKLVIKTKSVEYMPLSLSVASFANGVAWTIYALLPLDPYILIPNGLGTLFGLAQLILYASFYKSTKLQKEEREGKGQVVLSDQLVTNGKECWKNDNIESGNPRAEVHGA

SEQ ID NO: 296 - protein, 261 aa, Cucumis sativus
MVSLVLARTVIGIIGNIIALFLFLSPLPTFVTIWKRGSVEQYSPIPYLATLVNCLVWVLYGLPVVHPGSILVITINAAGTLIELVYIILFFVFSDRKKRMKVLLVLLIELVFITVLTLLVLFIFHTHSKRSMVVGTICILFNIGMYASPLAVMKLVIKTKSVEYMPLSLSVASFANGVAWTIYALLPLDPYILIPNGLGTLFGLAQLILYASFYKSTKLQKEEREGKGQVVLSDQLVTNGKECWKNDNIESGNPRAEVHGA

SEQ ID NO: 297 - protein, 218 aa, Cucumis sativus
MVSLVLARTVIGIIGNIIALFLFLSPLPTFVTIWKRGSVEQYSPIPYLATLVNCLVWVLYGLPVVHPGSILVITINAAGTLIELVYIILFFVFSDRKKRMKVLLVLLIELVFITVLTLLVLFIFHTHSKRSMVVGTICILFNIGMYASPLAVMKLVIKTKSVEYMPLSLSVASFANGVAWTIYALLPLDPYILVFSTQNSIQYSFNLIKYICILLSLA

SEQ ID NO: 298 - protein, 291 aa, Cucumis sativus
MALFDTHHPGVFAFGLLGNIISFIVFLAPVPTFMRICKKKSTEGFQSVPYVVALFSAMLWLYYASFNSNETLLITINSVGCLIETLYIAIFIVFAPKQIRVSTLRFVLLLNFGGFCIILLVTHFLVHGSNQVKVVGWICVAFSVSVFAAPLTIMRLVIRTKSVEFMPFSLSFFLTLSAITWLLYGVFLKDIYVALPNVLGFIFGVAQMILYLIYRKYEIAIAKEMKLPEQTTVDIVMKQKQDSSVEAIEVIIKTNIEEIELSNGNNNNDNDKHNHKTLEVSHQITDHLNHV

SEQ ID NO: 299 - protein, 295 aa, Cucumis sativus
MALSFNTHNPAAFTFGLLGNIISFIVFLAPVPTFMRIYKKKSTEGFQSIPYVVALFSAMLWLYYASFNPNETLLITINSVGCLIETIYLAIFIVFAPKQIRVSTLRFVLLLNFGGFCIILLVTHFLVHGSNRVKVVGWICVAFSISVFAAPLTIIRLVIRTKSVEFMPFYLSFFLTLSATSWLLYGVFLKDIYIAVPNIPGFMFGIAQMILYLIYKKRETAMEMQLPQHSTDNIVIVSAATNSDKQKQHSSSLPSNNLVGAAVDDDDVTTTTKNGIDPINNLEQNHQVKDQLNHV

SEQ ID NO: 300 - protein, 278 aa, Cucumis sativus
MALSFMNHNPWIFAFGLLGNIFSFIVFLAPVPTFIRVCRKKSTEGFQSIPYVVALFSALLLIYYSTLNADEFFLMTINSVGCFIETIYIALYIAYAPKKARIFTVRFVLLLDVVGFCSILVVTQFLVKRAYRARVIGFICGGLSVSVFAAPLSIMKRVIRTRSVEYMPFSLSFFLTLSAVMWLCYGLFLKDLYVALPNTLGFTFGMAQMILYAIYRNAKPLPSEEKLPQHKADIETQIVITATPTNPDDHQGDEHQNQDQVINVPPPPPQSNTNHAPS

SEQ ID NO: 301 - protein, 292 aa, Cucumis sativus
MAISPQTLAFVFGLLGNIISFMVFLAPLPTFYKIYKKKSAEGYQSVPYVVALFSAMLWIYYALLKTNATFLITINSFGCVIESLYILLFIIYAPTKLRFQTAKVIFLLNVLGFGLMLALTLVLAKGEKRLKVLGWICLVFNLSVFAAPLFIMGKVIKTKSVEYMPFALSFFLTLNAVMWFFYGLLLKDYYIALPNVVGFVFGIIQMILYVIVKHIGNKSRIPVKDEKAAAPPQLHELSEQIIDAVKLGTMVCTELNPVPVTVLQPNMDVVDAVVEAVIDNIQKKKDQDIITN

SEQ ID NO: 302 - protein, 295 aa, Cucumis sativus
MAASLSFVMGIIGNVISILVFASPMKTFIGIVKKKSTENYKGIPYVTTLLSTSLWTFYGILKPGGLLVATVNGVGVLFQLFYVTLFIVFAPKQKKVTTIKLVGLFNVLFYGSVIGATLLVMHGPLRLTFVGIICAALTIGMYASPLAAMKNVIRTKSVEYMPFLLSFFLFLNAGIWSAYALLVKDIYIGVPNGIGFVLGLAQLILYGIYKNKSKSTKSTEMMEDEGSAQLVEMGMNGEDDHQKNRSIIKGLSLPKPTLDRQYSVKNILRSLSYGPYDFHSTGPLDEYDEVENGKF

SEQ ID NO: 303 - protein, 259 aa, Cucumis sativus
MRSLYTIRMAVGIIGNGASLLLYTVPILTFWRVIKKKSTEEFSCVPYIVALMNCLLYTWYGLPIVSKGWENFPVVTINGLGILLELSFISIYFCFASSQAKKKVVLKMVGVVTVFLCVGMISSFVLKTHHLRKFFVGCIGLVASIAMYASPLVAMKQVIKTKSVEFMPFYLSFFSFSASSLWLAYGLLSHDLFLASPNLVGSPLGLLQLVLYCIYRNKEHEQGVLKKEKGGVIMEIQPNWDLEKNNNENHIPHQNNSKI

SEQ ID NO: 304 - protein, 196 aa, Cucumis sativus
  misc_feature (196)..(196): Xaa can be any naturally occurring amino acid
MAELSFFVGVIGNIISVLMFLSPAGTFRRIIRNKSTEEFESFPYVCTWLNSSLWTYYGIIKPGAYLVATINSFGVVVQSFFLGVFLIYAPSLMKAKTGIMVGILDIGMLTAAIVVSELVLEGEKRIEALGFVCAGLNIMMYASPLSVMKTVIKSRSVEYMPFMLSLFFSLNGGIWTFYAFLVHDWFLAVPNGMGLX

SEQ ID NO: 305 - protein, 262 aa, Cucumis sativus
MNGLSVHQLQFIFGLLGNIISFLVFLAPMPTFWTIYKKKTSEGFQSIPYVVALMSAMLLLYYAALKTNAYLLVSINSFGCVIEVIYIALYLFYAPKKQKIFTLKLFIIFNLGFSGVMVGGTMFFLHGMKRTNAVGWICAAFNLSVFASPLSIMKRVITTKSVEYMPFSLSFFLTLSATMWFFYGFFIKDLFIALPNVVGFLLGMVQMIMYMIYKDSKGKVEEKLEEGAKFCEEDDQTLSIVKTQSETKEINMAETNHYKIHE

SEQ ID NO: 306 - protein, 247 aa, Cucumis sativus
NIISFMVFLAPVPTFWTVYKKKTSEGFQCIPYVVALMSAMLLLYYAVLKTNAYLLISINSFGCVIELIYIALYFYYAPKKLKIFTLKLLMILNLGSYGVMVGGTMLILHGNKRTHAVGWICAAFNLAVFASPLAIMKRVITTKSVEYMPFSLSFFLTLSATMWFFYGFFIKDLFIALPNIVGFLLGMVQMIMYMIYKDRKGNSLEEKLEEGGKKYEVDDQSLSKVKKSNQSETSEINMGETNHNNIV

SEQ ID NO: 307 - protein, 265 aa, Cucumis sativus
MVSPDAIRTILGIFGNAISLFLFLSPVPTFIQIWKKGSVEQYSPVPYLATLINCMVWTLYGLPMVNPGSILVVTINGTGVVIELVYIILFLIYSDGKKKRLKVLLMMLVEVIFVALLALLVLTLAHTYHRRSAIVGTVCILFNIMMYASPLTVMKLVIKTKSVEYMPFFLSFASLANGIVWTAYACIRFDPFITVPNGLGTLSALVQLILYATFYKSTQRQIAERKAQIHLSEVVVNSAVSLPEKTANGGASTTPISDTTATRKA

SEQ ID NO: 308 - protein, 236 aa, Cucumis sativus
MLSAFEIRNIVGIIGNIISFGLFISPVPTFYKIYKSKSVEEFKPDPYIATVMNCMFWVFYGTVHPDSTLIITINGVGLAIELFYLAIFCWYAESKSRKKVGICLAIEVLFLGIVALITLLTLHGTKKRSLLVGIICDIFNVIMYASPLTIMAKVIRTKSVKYMPFTLSLANFLNGCIWTAYALIIFDIFVLVSNGLGAISGLLQLILYGYYSVFHQNKEDSDSKTSEVQLSTTATA

SEQ ID NO: 309 - protein, 247 aa, Cucumis sativus
MVSADLARFIVGVIGNVISFGLFLSPVPTFYEIIKKKSVEEFKPDPYIATALNCMFWVFYGMPFVHPDSFLVITINSVGLLLEIIYLTIFFLYADYRGRTKVCISLLIELILVSIVIHITILALQGTKNRSLMVGIICDIFNILMYVSPLTIMKKVIKTRSVKYMPFPLSLASFFNGCIWMSYALIKFDIYILICNGIGVISGLLQLFIYAYYYLTGSKVEEIIEKEPSKLEQNKVQLSVIEGPCKV

SEQ ID NO: 310 - protein, 256 aa, Cucumis sativus
MTIFHSPHLLVFTFGLLGNIISFFVYLAPLPTFYRIWQKKSTEGFHALPYLVALFSSALWLCYAFLKTNTFLLITINSFGCVIEFLYFIVFIVFAANSVRMLTIRIFAMMNMGLFGLILVAIHFIPNPSNRTDVMGWICVAVSVSVFAAPLSILRQVMTTKSVEFMPFTLSFFLTLSAIMWFAYGLLLNDICIAIPNVVGFILGLLQMVVYAIYRKRKIVIMEEKKQPEQVVLKSIAVSEVFAMKKSNGNDAQLKE

SEQ ID NO: 311 - protein, 278 aa, Nicotiana attenuata
MAVFSASQLAFVFGVLGNGVSFLVYLSPIPTFYRICKRKSTEGFQSIPYSVALFSAMLYLYYAYLKEKNGILLITINSFGTAIELIYLTIFLIYATREAKIYTTKLVLLLNIGSFGAIVALTYIFAKDKTRVTIVGWICAVFSVCVFAAPLSIMRRVIRTRSVEFMPFPLSFFLTICAVMWFFYGLLIKDMYIATPNILGFTFGIAQMILYAIFRNRKQQIQPADSNLKDLTQVVIDMKAMVLEMQENSDPNKEAQVDDTDEKQTNKQEVVAQTTSNV

SEQ ID NO: 312 - protein, 383 aa, Nicotiana attenuata
CGCAAGTGAACTTGCAGCCGCAGCCGCAGTATGAAACCCCGGTGCTTGTGGTGTGTGCTGCAGCTTGAMAIFDLHHPWIFVFGILGNIISIFVFLAPVPTFRRIYKEKSTMGFQSVPYVVALFSSMLWMYYAFIKKNAILLVSINSFGCVVETIYISIFLLYASKEARRQTVKLLVSLIGGLYTLIFLVTLFPLNGALRVQVVGWICVAVAVAVFAAPLSIVFQVVRTKSVEFLPFTLSFFLTLSAIMWFCYGLLQKDMCIALPNVLGFFLGMIQMLLYGLYRKVKPAAELDKKVPEHVVNIVVLGNSEQIHPVKSEKNEDMIKKLDEEENRESSVISPPVPALLPVANHHENEERAGGELAQVNLQPQPQYETPVLVVCAAA

SEQ ID NO: 313 - protein, 298 aa, Nicotiana attenuata
MAGFSTDHWAFAFGVLGNIVSFIVFLSPMPTFYKIYKKKSAEGYQSIPYVIALFSSMLWIYYAFLKTNTTLLITINSFGVFIETIYVGFYLFYAPKKAKVQTVKMLLLSVVGGFGAIVLVTQFLFKGAVRGQVVGWICLVFSLCVFVAPLGIVRKVIKTKSVEYMPLLLSVFLTLSAVMWFFYGLLLKDINIAAPNVLGFVFGILQIVLYVIYSKKEKAILKEQKLPEIQKPAVILLDENMNNKKLPELTQEQIIDIVKLGLMVCSDKAHVESCPHDTTCAAKAHENTPPKLQTVEAA

SEQ ID NO: 314 - protein, 282 aa, Nicotiana attenuata
MAISGHWAFAFGVLGNIVSFIVFLSPLPTFYKIYKKKSTEGYQSIPYVIALFSSMLWIYYAFLKTNTTLLITINSFGVFIETIYVGFYLFYAPKKARIQTVKMLLLTVVGGFGAIILIAQFLFKGVARGQVVGWVCLVFSLCVFVAPLCIVRKVIKTKSVEYMPLLLSVFLTLSAVMWFFYGLLLKDINIAAPNILGFIFGILQIVLYVIYNKKEKHILKEQNLPELQNHVIILEDNKKLPELTEEQKIDILKLSKLVSSLHENACAAAKEEKLPKLQTVQA

SEQ ID NO: 315 - protein, 295 aa, Nicotiana attenuata
MAVISGHWAFTFGVLGNIVSFIVFLSPLPTFYRIYKKKSTEGYQSIPYVVALFSSMLWIYYAFLKTNTTLLITINSFGVFIETIYVGFYLFYAPKKAKVQTVKMLLLSVVGGFGAIVLVTQFLFKGAVRGQVVGWICLVFSLCVFVAPLGIVRKVIRTKSVEYMPLLLSVFLTLSAVMWFLYGLLLKDINIAAPNVLGFFLGIVQIVLYVVYNKKEKANLKEQKLPEIQKPAVIVVDEKMNNTKFPELTQEQIIDIVKLAGLLVCSDKVHVASCPHDTNCGVKVENIPKLQTVEE

SEQ ID NO: 316 - protein, 288 aa, Nicotiana attenuata
MTGISIHVWTSAFGVLGNIVSFMVFLSPLPTFYSIYKKKSTEGYQAIPYVVALFSCLLWIYYALLMPQSNLIFIITINTIGCFIETIYVGIYLFYAPKKARVQTVKMLLLLVVGGFGAMVLVIQFLFKGAVRGQIVGWICLVFSVCTFAAPLCILRKVIKTKSVEYMPFFLSFFLTLNAVMWFFYGLLKRDKIVAIPNILGFIFGILQMILYVVYNKKEKNVIKEQKLRELQNHVIISDEQKKLPQLTEEQIIDIVKLGAIVYSEKFNARGTEAAKVENMPKLQTVDV

SEQ ID NO: 317 - protein, 252 aa, Nicotiana attenuata
MAIIKILHTLFGIFGNVTGLFLFLAPMITFKRVIMNKSTEQFSGIPYVMTLLNCLLSTWYGLPFVSPNNILVSIINGTGAGLETFYVLTFLIFAPKREKAKISGLLFVVLSIFSTVALVSMLALHGNKRKIFCGFAAAIFSIIMYGSPLSIMRLVIKTKSVEYMPFFLSLFVFLCGTSWFVYGLLGKDPFIAVPNGVGGLLGTAQLILYAIYRDNKGKDKKGEEDKIANMELGKPQENKDQLLNTQNGDAKA

SEQ ID NO: 318 - protein, 251 aa, Nicotiana attenuata
MVFNRDIARFAVGVIGNVIALILFLSPLPTFIRIWKNKSVEQFSPIPYLATFVNCGLWVLYGVPWVQPNSILVVTINGTGLGIEIVYLTLFFLYSDRKLRTKVFLVILGEIIFVATLAICVLSFVHGNKKRAAIVGSICMVGNILMYASPLAVMKLVIKTKSVEYMPFFLSLFSFLNGVSWTAYAFIRFDAYILAPNSMGTVLGLAQLLLYATYYKSTKRQIAERETKGELVMAEKSVTGVAQKPRNDSRV

SEQ ID NO: 319 - protein, 237 aa, Nicotiana attenuata
MVSLASSQTLEICKDVAGIAGNIFAFGLFLSPIPTFRRVIRNQSTEQFSGLPYYSNVYGLLNYLICAWYGTPLISPDNLLVTTVNSVGAVFQLAYIVLFVMSIEKEKKFRMLGWILTVFGLFSIIVIGSLLIVDLQLRRIIMGSLSCASLISMFASPLFIINLVIRTRSVEFMPFYLSLSTFLMSASFFLYGTFSFDPFIYVPNGIGTVLGVVQLLLFAYYRNSSRGDFTEGFIVSY

SEQ ID NO: 320 - protein, 295 aa, Nicotiana attenuata
MADFSGHWAFTFGVLGNIVSFFVLLSPLPIFYKIYKKKSTEDYQSIPYVVALFSAMLWIYYAFLKSNTTLLITINSFGCFIETIYVGFYLFYAPKKARVQTVKLLLLSIFGGFGPIVLVTQFLSKGVVRVQVVGWICLVFSLSVFVSPLCIVRQVIKTKSVEYMPFFLSVFLTLSAVMWFFYGLLLKDFNIAIPNVLGFIVGILQMVLYVIYNKKEEVIVKEQKFPELQNHVIILHNDKNFPELTEEQIIDIVKLGSLISCTEKFNVVSYLHENVAETAKGHKKLQAVEINLRLS

SEQ ID NO: 321 - protein, 294 aa, Nicotiana attenuata
MAGISGHWAFAFGVLGNIVSFIVFLSPLPTFYRIYKKKSTEGYQSIPYVVALFSSMLWIYYAFLKTNTTLLITINTFGVFIETIYVGFYLFYAPKKARVQTVKMLLLSVVGGFGAIVLVTQFLFKGAVRGQVVGWICLVFSLCVFVAPLGIVRKVIKTKSVEYMPLLLSVFLTLSAVMWFFYGLLLKDINIAAPNVLGFFLGIVQIVLYVVYNKKEKANLKEQKLPEIQKPAVIVVDEKMNNTKFPELTQEQIIDIVKLGLLVCSDKVHVASCPHDNTCVAKVENIPKLQTVKA

SEQ ID NO: 322 - protein, 235 aa, Nicotiana attenuata
MENLVFIIGVIGNIISILMFLSPVGTFRRIVKNQSTEDFDSLPYICTLLNSALWTYYGLIKPGSYLVSTVNGFGVIVEIIYVALFLLFANPKMRKTTAILAGVLNVGILATTLLYAQFLLHGETKINVIGFFSTCLNIVMYSSPLGVMTTVVTTKSVEYMPFLLSFFLFLNGGVWTLYAVLVADWFLGVPNGMGCLLGAVQLVIYAIYRNPSSTQPIVEDLEQGSQTQPLLPPQL

SEQ ID NO: 323 - protein, 250 aa, Nicotiana attenuata
MGVVHTLQFTFGILGNAATLFLFLVPTFTFKRIIKNRSTEQFSGLPYVMTFLNCLLSAWYGLPFITSDNILVATINGAGATIELIYVLIFVALAPNKQKGKILATLLLVLLVFAGAALVSLFVFHGKNRKLFCGTAATIFSIVMYASPMSIIRLVIRTKSVEYMPFFLSFAVVISCICWFTYAMLGRDPFIGISTGVGLFLGIVQLILYAIYCDKKVLTNKSTDVSLEMGNGHSNVEFHYEEKQYNQSNH

SEQ ID NO: 324 - protein, 260 aa, Nicotiana attenuata
MADMLRLAVGVMGNAASMLLYAAPILTFSRVIKKKSTEGFSCVPYVLALFNCCLYTWYGLPVVSYRWENFPVVTINGIGILLEISFILIYFWFSSAKGKKEVAKMVVPIILICVATGIISAFVFHDHRRRKVFVGSIGLVASVAMYASPLVVVRQVIKTKSVEFMPFYLSFFSFLASCLWMAYGLLSHDLFLASPNLVGTPLCILQLILYCKYRKNPIKDLEPKKWPNLEYNDEKIKQEFPLDEVKESKLIVTENLSTKI

SEQ ID NO: 325 - protein, 294 aa, Nicotiana attenuata
MIHLAFTFGLLGNIVSFMVFLAPVPTFYKIYKKKSTEGFQSVPYVIGLFSAMLWIYYAFLKPDTTLLITINSVGCCIQSFYICFFLFYATKKAKMDTVKLLLLLNFFGLGLIILLTQFLAKGSNRAQIVGWICLIFSLCVFVAPLGIVRQVIKTKSVEYMPFLLSFFLTLSAVMWFFYGLLRKDYNIAIPNVLGFTLGVLQMVLYVIYKNAKKVTKEVKIAEKENTVTIVEEHKISEDKLKEQIIDVVKLSAMVCSEIIPIVPELNEINMPQLSGIINGEKIKPKETIEASVEV

SEQ ID NO: 326 - protein, 298 aa, Nicotiana attenuata
MAAISGHWAFAFGVLGNIVSFIVFLSPLPTFYKIYKKKSTEGYQSIPYVVALFSSMLWIYYALLKTNATLLITINSFGVFIETIYVGFYLFYAPKKAKVQTVKMLLLSVVGGFGAIVLVTQFLFKGAVRGQIVGWICLVFSLCVFVAPLGIVRKVIKTKSVEYMPLLLSVFLTLSAVMWFFYGLLLKDINIAAPNVLGFILGIVQILLYVVYNKKEKANLKEQKLPEIQKPAVIVVDENMNSKKLPAELTQEQIIDIVKLGLLVCSDKVNVASRPHDTTCGVKAPKVENMPKLQTVEA

SEQ ID NO: 327 - protein, 280 aa, Nicotiana attenuata
MAQLSAHDLSFMFGLLGNIVSFIVFLAPMPTFYKIYKRKSSEGFQAIPYLVALFSAGLLLYYAYLKKNAYLIISINAFGCFTELAYIGLFLFYAPRKSKMFTGWLMVLEVGALGMVILFSYVFAQGSERVTIVGWICAAINLAVFAAPLSIMRQVIRTKSVEFMPFTLSLFLTLCAIMWFFYGFFRRDFYIALPNVLGFLFGVVQMLLYFVYKDSKRENINEKSDLEEAAKSKDIETGIKIEVEGGSDKELHSMEMAFPDCGNQNKQEDDQEMARIRSLK

SEQ ID NO: 328 - protein, 351 aa, Phoenix dactylifera
MKLLIAVLALQFCYAGFHIVSRAALNIGVSKVVFPVYRNIIALVLLAPFAYFLEKKDRPPLSFSLFVQFFLLALCGITANQGFYLLGLYYLSPTYASAIQNSVPAITFAMAAALRLEQLKIKRRYGLAKLVGTVVSVGGATIITLYKGPPLLHHPAHIKLGAISSVDPILNWTLGCVYILGNCIAWSGWMVLQVPVLKKYPARLSLTTFTCFFGLIQFMIVAAFTENDIERWKVHSGEELFTILYAGLVASGAAFSLQTWCIDTGGPLFAAVFQPVQTVMVAILSATIFGDQLYSGGIIGSILIMVGLYFVLWGKSQEKKASNQEMEKDLTRHLLEEEDSHKYVAAVAEIP

SEQ ID NO: 329 - protein, 236 aa, Phoenix dactylifera
MDDKKPYIAIIVIQAIYAGMTLLSKAAFNGGMNTAVFVCYRQAIGTAVLVPFALALTRTTFSLNVLSVAINYTSAAVASAATNTIPVMTFLLALVFRMETIKLKSISGIAKIFGVALCLAGVLVIAFYEGPSLKSLNHLQLSLLGTNAIDNDTNSKQKWVLGTFLMVVFTTSWSLWIVLQGLILQEYPSKLLFSALCNTFGTIQSFLVGLAFERDFAEWKLHLDEGLLAVAYNVNY

SEQ ID NO: 330 - protein, 354 aa, Phoenix dactylifera
MDGKKPYMVLIFIQLIYTGLYVICKAALDNGLSSYVFVFYRQAAASILFVPLAIIFERKSAPPLPFPVLLKAFMHATLGITLSLNMYNIGLIYTSATVGSATTCSIPVNTFFLALLLRMETMNLRSLPGGAKALGVALCLAGITTIAFYTGPHLNPLIHYHPFGHKTSSTSDGPAQQMQSWIKGTFIMITANAAWSSGIVLQGILLNDYPSKLLLTTLQCLLSTVQSFFVAMIFERDVSRWKIGLDTGLLAILYCGFVVSGVSYYLQTWCIEKKGPVFLAMSTPLALVFTIICSSFFLGELIHLGSVLGGVLMVGGLYSVLWGKGKEDVVRESINEDVKNSVEERGAASPFHPV

SEQ ID NO: 331 - protein, 394 aa, Phoenix dactylifera
MALVEELQSLEKNQTWKLVRLPEGKKAIGCKWIFKNKEGASHQDFRYKARSPYDSCVYHQRFSDGSFCYLLLYVDDMMIAAKDISIIQNLKAELSTAFEMKDLGPAKKILGMEISRDRQLGRLFLTQHGYIKKVLDRFGMSIVKPVTTPFASHFKLSATLCPQTEDEERYMSRVPYASAVGSIMYAMVCTRPDISQAVSVVSRYMDKPGKAHWSAVKWILRYLKGTSNLGLVFSAQSNCTITGFSDSDYASDLDRRRSLTGYVFTLSGCAVSWKATLQPTVALSTTEAEYMALTEAAKEAIWLRGLVQDLGLEQDRLDINCDNQSALHLARDQMYHERTKHIDVRYHFIRDLVENGDVRIQKIYTAHNPADMFTKPITAVKFRTFLNLIGVSTC

SEQ ID NO: 332 - protein, 135 aa, Phoenix dactylifera
MAIGEFVSVYAQYDIEVAQMERASLESSESRDKEKESLPSPVMAAGASALAFAVGALLPLLGGGFIRSWGVRVGVVCAVSSLGLAGFGVAGAVIGGANVSKSALRVLVGGWLAMALTYGVLRLFGLVFKMHVSST

SEQ ID NO: 333 - protein, 236 aa, Phoenix dactylifera
MSFCPSSHIHATPSTPPPNPQHDPCTQIALPSQLHDPESDQKPVPIDYSARSQWLRAAVLGANDGLVSVASLMIGVGAVNQTAKAMLVSGLAGLVAGACSMAIGEFVSVYAQYDIEVARMERESLESGGIEAGREKESLPDPLMAAGASALAFGMGAVLPLLAGAFVRSWGVRVGLVCAVSSLGLAGFGAAGAVLGGANVSKSALRVLLGGWLAMLVTYGVLRLFGLVFKMHVSSI

SEQ ID NO: 334 - protein, 326 aa, Phoenix dactylifera
MADDAGKKVCGVPERVQLHVAMLALQFGYAGFHVVSRAALNMGISKVVFPVYRNIIALILLVPFAYFLEKIEKVRIDRRDGIGKLTGTLACVAGASVITLYKGPTIFSPSHALNQPSPRSTPTMLWLGDAQGKNWTLGCLYLIGHCLSWSGWLVLQAPVLKKYPARLSVTSYTCFFGVIQFLVIAAFIERDAEAWIFHSGSELFTILYAGFIASGVAFAVQIWCIDRGGPVFVAVYQPVQTLVVAIMASIALGEQFYLGGIIGAVLIIAGLYLVLWGKSEERAFAAREAAVVVSSTGENDGIRSTTPFKASSITQPLLPPSSPENV

SEQ ID NO: 335 - protein, 466 aa, Phoenix dactylifera
MLWQLWIALCIATNSSAWLGTGVLVTNMRNFPLSRGPVAGILKGYIGLSAAVYTEIYIGLLRDSSTKLLLFLTLGIPGICLAMMYFVRPCTPSLEEDSSEHGHFLFTQISSILLGLYLCATTVLDDVASPSDAVAYSLFAVMVLLLLAPLAIPLKMTLYPKKSKKIGSIGPSGSSDCLIEGNLDKSEPLLAQSSSTTNAGSIQEADDVSDVDILLAEGEGAVKKKRRPKRGEDFEFREAVIKADFWLLFLVYFLGVGSGVTVLNNLAQIGIAAGVDDTTILLCLFSFCNFAGRLAGGAVSEYFVRSKMFPRPIWMTCTQVIMIITYLLFASGLNGTLYASTALLGICYGVQFSVMVPTASELFGLKHFGLIYNFMLLGNPLGALLFSAGLAGYLYDVEAAKQNSGFHDALSNSCLGPNCFRITFLALAGVCSLGTLLSIILTVRLKPVYQMLYAGGSFRQPRSLNH

SEQ ID NO: 336 - protein, 211 aa, Phoenix dactylifera
FLFLESTHLRILLASFTLAALAENGICWINTACYIICIQNFPSDSRVTVGLSTSYVGLSAKIYTVVADVIFQPQLNHDAKTHLLLNAIVPILASLLVAPFLREMETKNKARSSCGFMVMFAITLATGICAVVSGIRSQSRELAISLGMFLTAPLVGSAMVFWNQESDKIWSDGKRGPLESKKAIISFNLFGCGEYKDSDTRFLEIHLANPL

SEQ ID NO: 337 - protein, 278 aa, Phoenix dactylifera
MAGLSLDHPWAFTFGILGNIISFMVYVAPLPTFYRVYIKKSTEGFQSVPYVVALFSAMLWIYYALIKTDSYLLVTINSIGCIIETMYIIMYLSYAPKKARIFTAQILLLLNVGLFGLIVLLTLLLAKGPREQVRVLGWVCVSFSISVFVAPLSIIRLVIRTKSVEFMPFWLSFFLTLSAIAWFSYGLLTKDIYVALPNILGFIFGVVQMGIYIAYKGAKRAAYDQNKVAEHIITMAKLGTGERSSEVHPIDVISSPAYVREDGRLYPEVDAFGAYLVA

SEQ ID NO: 338 - protein, 254 aa, Phoenix dactylifera
MAFGEVVSKVKPYLAMVFLQFGYAGMFVISVASLKHGMNHYVLVVYRNAVAVAVVAPFALWFESVIGAAVIVIGLYSLIWGKSKDHLNQPSEGSEKKGEFELPTAIADAGKSGRCNKYFNRSNPVVISALVLRISNLFWFGSSAQDPLEFFGSTGAEACVSPPRTGGHTPVTGGRKVYGSTRRRRTLALGNRIGAAPTAARLLCSVLLLISLLPPGATALCLNLPGVSEEIQPNVVVLADYAVTKARDQVEKDF

SEQ ID NO: 339 - protein, 581 aa, Phoenix dactylifera
MKVVELSALAVQVVRGRWFTVFASFLIMAASGGIYIFGIYSNDIKTALGYDQQTLNTLAFFKDLGASVGIISGLIYEVTPPWVVLALSAGINLFSYLMIYLAITGRIARPHVWQMCLYLCLGGNAQAFTNTGAVVTCVKNFPASRGVVIGLLKGYVGLSGAIVTQLYLAFYGGDSRSLVLLIAWLPAAIPLVFISTIRIFKSTRQPGESSKPFYCFLYVSLFLATFLMVMIVVQKRFTFSHSAYSVSAAIVLLLLFLPLAVVTKEEFKIFRKKKQSLQDPPPLSVAIETPTVPQPPPPEPKPTPATASPIKKSSPLSHVIRIFKAPDRGKDYSILQAVVSTDMLILFLSTISGVGGTLAAIDNMGQIGQSLGYPARSISTFVSLISIWNYAGRVAAGFASDIFLAKYKLPRPVLLAAVLLLAGAGHLLIAFGIPGSLYVASVIIGFSLGAQVPLLFAIISEVFGLKYYSTLFNFVPLATPIGTYVLNVKVAGKLYDREAAKQYAKLSGSSVKSLTCTGVQCFKLSFLIIAAVTVLGALVMLVLVWRTWDFYKGDMHEKYREESQGMPLMLDQRKDDDSKER

SEQ ID NO: 340 - protein, 215 aa, Phoenix dactylifera
GSAMVFWNQESDKIWSDGKRGPLESKKFFWSSYAIHFGLLFNKPIVYPFNISPIIYSKDPDGAYDCIYVGISTSYVGLSAKIYAVVADVIFRPQSNYDAKTYLGLNAIVPILVSILVAPFLWEMEIKNKARSSCGFMVMFAITLATGICAVVGSIRPESREDAISLGLLLTAPLVVPLAMKYREGKEELWWNRRERRVHDITVDEVENDIIVEEL

SEQ ID NO: 341 - protein, 383 aa, Phoenix dactylifera
MGSSSIPVLLFPWLTLVSIIWLQSINGTNSVFPDYSSQLKSRLKISQVKLNYLTVASDAGKLFGWCSGVAARHLPLWLALMIGAIIGSVGYGVQFLFLASKIASLAYWQAFLLCVLAGNSVCWINTVCYIAAMRKFPVDHGTVVCLATSYAALSAKIYIAMTQVILGGDPSDKSIYLLLNSIVPILTGAITSPFLKESKPAGPKTRAGLVTILVIAGVTGSYAVVETAAPVFGSMPRRLPPLILLVMVVLLIIFVPLVNVIEWIKEGSWSLAREGEGVEKSVIKVEDKEVDREGGAGCGEEERWETWVRREYRVRELVASMEFWLYFLVYGCGGTLGLVYANNLGQISRSRGISDTVLVSISSSFSFFGKLFSAPLSAFSRSV

SEQ ID NO: 342 - protein, 507 aa, Phoenix dactylifera
MPSPSVQWLSFVGTIWLQTINGANSDFPVYSSQLKDLKSFSQVKLNFLAFASDAGKLFGWFSGLAAIFLPLWLVAVIGATFGLVGYGVQFLFLGSTHLSYWHLFTLTALAGNGICWINTACYIICIQNFPSDSRVAVGISTSYVGLSAKIYAVVADVIFRPQSNHDAKTYLGLNAIVPILVSILVAPFLREMETKNKARSSCGFMVMFAITLATGICAVVGSIRPESREHAISLGLLLTAPLVVPLAMKYREGKEELWWNRRERRVHDITVDEVDTRESVMDLEMREVESVDGKVEESVEVGGLQLLKKVNFWLYFFSYMFSATLGLVFLNNLGQIAESRGFSKTTTLVSLSSSFGFFGRLMPSVLDYSSTKSGYMVSRPAFMATLMAPMAGAFFLLLNPSRLFLYLGTTIIGGCTGAITSIAVSATPELFGTKHFGVNHNIVVTNIPVGSFLFGYFAAFLYQREAEGSHSCNGIRCYEKTFIIWGSTCSVATLLCTVLYARTRKFC

SEQ ID NO: 343 - protein, 583 aa, Phoenix dactylifera
DDYVKKIREREYRRSHGESPWSYALWRGPARHDSESDSGDEWRKRLRKKRIEERRRLKSRDWRWRDKRSCDTESDEEPIHAQKPYGRGDYMDEKWKRPIANGYGKDAIKGPRLQEKEPRNLSNDSFKCSSRDSKSLQQKTTSTGKEVAESSNKEQPKEVRKLPQEKLQGYIKNGLCFQCGNKWKGSHCCKPDQDAAISDGSHKETKLHIAKPGDAHSEGVAGPTSAATQPPSDAIAAPKEEATRHTKKKTSKLTATAKIPIPGDTNPCPALPRPASSNPAPTQQPNPSPGTLPTTEAWTYGLVAPGQRPGHTASASRSPTDQAAAPNFYKETTATANGIMHQRWAEGMINWRFVLVPIIPTFHHKMFGYLHNRKDDHDGMAHGYSNLILEGKDVLQGMGNDEVPSNSHGQRGRSGIGHETLAAKNAHAQALPSFCAWTPAVAHRSRPAHGAHPSTRALGPDQQQQQQSSACMATTKCALSPHILAQHSTPVRARSSAPMRIWRPVSERAQLAQQPSAGHDQRATCMRDPQTAPQGLRAVPSTATAPKARPPMRRSSSCPAARTRDLGAQDPHPELPSPASRHL

SEQ ID NO: 344 - protein, 369 aa, Phoenix dactylifera
MYAGLHITSKAALNGGMSAYVFVLYRLVLATLFMAPFAFALERKAAPPLPFKLCFKIFLLSLFGVTATMIIYAVALDYTSATLSSAIMNSIPVVLKFLTVFCFPTTTYRYTSLLLHHGRDVAMYLNHSISIHNSQETIKLKRLSGIMKVSGVLLCLAGILEMAFYKGPHFKPLNHHHLLGHGSRETNHPPTNSTKTWVLGTFLMTISNTTWSLWMVLQEPLLKEYPSKLTFTTLQCLFSAFQSFFIALALERDFSRWKLGLDAGLVSVIYSGIIVTGVAFYLQSWVIEKRGPVFLAMSTPLTLIITIMGSYFLQGELVNLGSVLGGLLMVGGLYSVLWGQRREQIDHNTPTEVERKASLDVKENGITQV

SEQ ID NO: 345 - protein, 97 aa, Phoenix dactylifera
MWMQSWAGIGYLFGSISPVIKSSLGYNQRQLASLGVAKDLGDSVGFLAGTLCEVLPLWAALLIGALQNLIGYGWVWLVVIGRVPVLPLWVFLLLGLI

SEQ ID NO: 346 - protein, 383 aa, Phoenix dactylifera
MADDAGKSVCGVPERVQLHVAMLALQFGYAGFHVVSRAALNMGISKVVFPVYRNIIALILLVPFAYFLEKKDRPAMTLSFLVQFFLLALCGITANQGFYLLGLDNTSPTFASAIQNSVPAITFLMAALVRIETVRIHRRDGIAKVAGTLACVAGASVITLYKGPTIFSPSHALNQPIPRSAPTMLWLGDAEGKNWTLGCVYLIGHCLSWSGWLVLQAPVLKKYPARLSVTSYTCFFGVIQFLVIAAFIERDAEAWIFHTGTELFTILYAGFIASGVAFAVQIWCIDRGGPVFVAVYQPVQTLVVAIMASIALGEQFYLGGIIGAILIIAGLYLVLWGKSEERAFAAKEATVMVSSTGENDGLRPTIPFKASSLAQPLLPSENV

SEQ ID NO: 347 - protein, 371 aa, Phoenix dactylifera
MWLSIAGVLPRPPPLLMCLYMLLAAHAQTFFNTADVVTAVENFPDSRGTVIGIMKGFLGLSGAILIQIYRALFDGKPSSFLLMLALLPTLLTLLLMFSVEVHKTKGGRDKKFLDVFSLIALTIAGYLMLVIIGERIMTVGSEARILIFLMLLLLLMSPLIIVVKAQTKELKIPAEASCDARIRLIEDINSLQVIEERKYSQPAAERSCMKHDHVGPDEISCDNGHERYNEETFLLPRGENLNLLQAIWTYDFWLLFLAMACGMGSGLATVNNISQIGGSLGYTSMETSTLVSLWSIWNFLGRFGAGYISDYFLRLRGCARPLFIAATLAIMSVGHVTISSGFPGSLHVGSVLIGLGGFTSRLYMQDYKLLL

SEQ ID NO: 348 - protein, 229 aa, Phaseolus vulgaris
MVNTNTIRTAVGIIGNVISFGLFMSPVPTFISIFKSKSVQNFKPDPYIATILNCGVWAFYGLPFVTPDNTLVISINSFGFFLEIFYTTVFFVYSPWNKRRKIMLIFLAEIIFIALLVFLVMTFVHTPKERKVIVGPICIVFNILMYFSPLTVMRQVIRTKSVKYMPFLLSFTNFANGIVWTAYALLKWDPFIVIPNGLGTLSGLTQLILYVMYYKSTNWDEEDETSSNI

SEQ ID NO: 349 - protein, 264 aa, Phaseolus vulgaris
MAIHHETWAFVFGLLGNVISFMVFLAPLPTFYQIYKKKTAEGFQSLPYVVALFSSMLWIYYALVKKDASLLLITINSFGCVIESIYLAIFLLYAPSKTRLCTIKLLLLLNVFGFGAMLLSTLYFTTGSKRLSVIGWICLVFNISVFAAPLCIMKRVIKTKSVEYMPFSLSFFLTINAVMWFFYGLLLKDYYIALPNTLGFLFGIIQMMLYLVYRNAKPKTLEEPTKLQELNGHIVDVVKLGTMAPSEPNHVTKSGAVTETATNV

SEQ ID NO: 350 - protein, 254 aa, Phaseolus vulgaris
MAETIRMLIAVFGNAASMSLYAAPMVTFRRIIRKKSTEEFSCIPYIIGLLNCLLYTWYGLPVVSCKWENFPIVTVNGVGIVLELSYVLIYFWFTSSKGKVKVAMTAIPVVLVFCITAAVSAFAFHDNRHRKILVGSIGLVVSVTLYGSPLVAMKKVIQTKSVEFMPITLSVCSFFSSTLWLIYGLLIRDIFVAGPSVLGTPLSILQLVLYCKYRKGSVVEEPSKGDQEKGNLEKVDMEMGKVETNVTNHMNENL

SEQ ID NO: 351 - protein, 245 aa, Phaseolus vulgaris
MEDASFIFGVIGNIISILMFLSPVPTFWKIIKQKSTEDFSSLPYICTLLNCSLWTYYGTIKPGEYLVATVNGFGILVEIIYIILFLIYAQKSIRVRTAILAVILDVVIFAAAVATTLLALQGDGRSGAVGVMGAGLNIVMYSSPLSVMKTVVTTKSVEYMPFLLSFFFFLNGGVWLLYAVLVRDVILGVPNGTGFLLGAMQLGLYCIYRNGGRKVSEKRLEEGMQHEPLISQPNNQSHQREHWAT

SEQ ID NO: 352 - protein, 291 aa, Phaseolus vulgaris
MSHSPLSFLFGVLGNVASFVCFLAPLPTFYRVCKKKSTEGFQSVPYVAALFSAMLWIFYAYVKTGETLLITINSFGCVIETIYLAIFLTYCPKKARMSTLRMIVLFNFGGFCTIVLLTHLLAKGAGRVKLLGWICVVFATSVFAAPLSIIRVVIRTKSVEFLPFPLSMLLLLSAIMWLLYGISLKDIYVTLPNVVGLTFGVIQIVLYMMYRNNKTLKNEKLPEHKGDIDNNENVAPTVSAENQEQEVNPQAGVVEIGEKKEDQLDEEKPDKTELNNNNSNNKKTEEESSEV

SEQ ID NO: 353 - protein, 247 aa, Phaseolus vulgaris
MDIAHFLFGIFGNVSALFLFLAPVITFKRIIKNRSTEKFSGIPYVMTLLNCLLSAWYGLPFVSPHNILVSTVNGTGSLIEIVYVLIFIVLAPKKEKVKILGLFTFVLSVFSAVVFVSLFALHGNSRKLFCGFAAAIFSIIMYGSPLSIMRLVIKTKSVEFMPFFLSLFVFLCGTSWFIFGLLGRDPFVAVPNGVGSALGTMQLILYFIYRDNKGAARKQTPAEEEFMEMGVAKPQQGKQSNANGTQG

SEQ ID NO: 354 - protein, 195 aa, Phaseolus vulgaris
MAIHHQTLAFIFGLLGNIISFMVFLAPLPTFYKIYKKKSTEGFQSLPYIVALFSSMLWIYYALVKREGTLLLITINSFGCLIETIYLAIFLVYAANKTRLSTIKIILFLNVFGFGAMLLLTLFLTKGSKRISAIGWISLVFNISVFAAPLGIMKRVIMTKSVEFMPLSLSFFLTLNAIMWFFYGLLLNDYYIAVS

SEQ ID NO: 355 - protein, 235 aa, Phaseolus vulgaris
MSLLAAFSICKVAKDAAGVAGNVFAFGLFVSPIPTFRRIIRNGSTEMFSGLPYIYSLLNCLICMWYGTPLISADNLLITTVNSIGAIFQFVYIILFLIYAEKAKKVRMIVLLVAVLGVFAIILVGSLQIDDILMRRFFVGFLSCASLISMFASPMFIIKLVIQTKSVEFMPFYLSLSTFLMSTSFFLYGLFNEDVFIYGPNGIGTVLGVTQLILYFYYENKSRENSREPLIVSYV

SEQ ID NO: 356 - protein, 235 aa, Phaseolus vulgaris; identical to SEQ ID NO: 355

SEQ ID NO: 357 - protein, 235 aa, Phaseolus vulgaris
MFLFGGYSICEIGKDAAGVAGNIFAFGLFLSPIPTFRRIIRNGSTEMFSGLPYVYSLLNCLICLWYGTPLISPHNLLVTTVNTIGAAFQLVYIILFLIYAEKARKVRMLGLLLAVLGIFVIILAGSLQIDDSAMRRMFVGFLSCASLISMFASPLFIIKLVIRTKSVEFMPFYLSLSTFLMSISFFLYGFLSHDAFISVPNGIGTVLGIVQLILYFYYKTLSTENCRQPLIVSYE

SEQ ID NO: 358 - protein, 270 aa, Phaseolus vulgaris
MIITHHTLAFTFGMLGNVISFLVFLAPVPTFYRIYKKKSTESFQSLPYLVALFSSMLWLYYAWLKKDAVLLITINLFGCVIEIIYIILYIIYATRDARNLTIKLFSAMNLGSFALILVVTNFIVHGPLRVQVLGWICVSVSVSVFAAPLSIVAQVVRTKSVEFMPFNLSFTLTLSAIMWFGYGLFLKDICIALPNVLGFVLGLLQMLLYTIYRKGNKKGNTMEKNPQEPLKNIVVASPMGTGEVFPVEEDEEAKKSQVEREEKKSEECVV

SEQ ID NO: 359 - protein, 272 aa, Phaseolus vulgaris
MAISHSSLAFAFGMLGNVISFLVFLAPITTFYRILKKKSTEGFQSLPYLVALFSCMLWLYYALLKKDAVLLLTINSFGCVIEIIYIILYITYATRDVRNLTLKLFFAMNVGCFVLILLVTHFAVHGSLRVQLLGWICVSLSISVFAAPLSIVAQVVRTKSVEFMPFNLSFTLTLSAIMWFGYGLFLRDICIALPNVLGFALGLIQMLLYAIYRNGNKKVDKMEKKAQLQQLKSIVIAESGEVFDVEEKQEGEKKEENMKEKEKSDEHNDCTV

SEQ ID NO: 360 - protein, 259 aa, Phaseolus vulgaris
MVSFSDHEMVLIFGLLGNIVSFLVFLAPLPTFYKIYKNKSSEGFQSIPYVVALLSALLLLYYGFIKTNALLIVTINCIGCVIEVTYLAMYIIYAHKKQKISTLVMILIADVGGFGLTMLISTFAVKGIARVHAVGWICAIFNIAVFAAPLSIMRKVIKTKSVEYMPFSLSLFLTLCATMWFFYGLFDKDEFIMLPNVLGFLFGISQMILYIIYKNVGKNTKTNCAEQQESEGTKQHSCGDNKLDFPSVVEMKENQLNQV

SEQ ID NO: 361 - protein, 244 aa, Phaseolus vulgaris
MVSASVARNIIGIIGNVISFGLFFSPAPTLYNIIKQKSVEEFKPDPYIATVLNCAFWVFYGMSFVHPNSLLVVTINGVGLVFEFVYLAIFFIYATNKGRRKMSLLLLIEAIFFAAIILVTMLVLHGTTRRSLVVGIICDVFNVMMYVSPLTIMAKVIKTKSVKYMPFWLSLTNFLNGVCWTTYALIHPLDIYVLISNSIGAISGLVQLLLYGFYYCRGENNDNGVELQNPAQVQVSERSADLEA

SEQ ID NO: 362 - protein, 245 aa, Phaseolus vulgaris
MVNPAVARNVVGIIGNVISFGLFFSPAPTFYGIVKKKSVEEFKPDPYLATLLNCAFWVFYGMPFVHPNSILVLTINSVGLVFEFFYLTIYYIYASNKGRKKILVFLLVELIFFAAVALVTMLALHGTKKRSLVVGILSDIFNVMMYVSPLTVMAKVIKTKSVKYMPFWLSLANFLNGVCWTTYALIHPFDLYVLISNGIGAISGLVQLILYACYSSCNSEKDDDGDHDLKPNGVQLSNLNGTVAV

SEQ ID NO: 363 - protein, 228 aa, Phaseolus vulgaris
MNCRPTFYKIIKQKSVEEFKPDPYIATVLNCAFWVFYGMPFVHPNSHLVVTINGVGLVFEFVYLAIFFIYATNKGRRKVSLLLLIEAIFFAAIILVTMFVLHGTTRRSLVVGIICDVFNVMMYVSPLTIMAKVIKTKSVKYMPFWLSLTNFLNGVCWTTYALIHPSTSMFCSWMKSPFISNSIGAISGLVQLLLYGFYYCRGENNDNGVELQNTTQVPVSGCSPDLEA

SEQ ID NO: 364 - protein, 244 aa, Phaseolus vulgaris
MVSASVVRNIIGIIGNIISFGLFFSPAPTFYKIIKQKSVEEFKPDPYIATVLNCAFWVFYGMPFVHPNSLLVVTINGVGLVIEFVYLAIFFIYATNKGRRKVSLLLLIEAIFFVAIVLITMLVLRGTTRRSLVVGIICDVFNVMMYVSPLTIMAKVIKTKSVKYMPFWLSLTNFLNGVCWTTYALIHPFDIYVLISNSIGAVSGLVQLLLYGFYYCRGENNDDGVELQNTAKVPVSECPPDLEA

SEQ ID NO: 365 - protein, 245 aa, Phaseolus vulgaris
MAVTLVVVAVLGNIASMSLYAAPTVTFKRVIRKKSTEEFSCIPYIIALMNSLLYTWYGLPIISNKWENFPLVTVNGVGVLFELSYILIYFWFSSPKAKVKVAMTAAAVLTVVGVIGIVSTFGIPDHRHRKLLVGSISLGVSIALYASPLVAMKKVIETKSVEFMPLPLSLSSLFACLMWMTYGLLIRDIFVAGPNVVGTPLGILQLVLYCKYWKRRPTEEPNKQNEHHEKLDLEIGHDKNLNVPN

SEQ ID NO: 366 - protein, 251 aa, Phaseolus vulgaris
MDIAHFVFGIFGNASGLFLFLAPIVTFKRVITNKSTEKFSGVPYPMTLLNCLLSAWYGLPFVSPDNILVSIINGIGAAIEVTYVFIFVLFAPKKEKAKILGLFSFVVAVFSAVVLVSLLALHGNARKLFCGFAASIFSIIMYGSPLSIMRLVIRTKSVEFMPFFLSLFVFLCGTSWFIYGLLGRDPFVAVPNGVGSALGTIQLILYFIYRDSKSDGKKATAASSSGTQEEGTVEMAKHANSNGTTTQEEQV

SEQ ID NO: 367 - protein, 273 aa, Phaseolus vulgaris
MAILGSHNPWAAAFGILGNIISLMVYLAPAHTFYRIYKKKCTEGFQSLPYLVALFSSSLWLYYASFNIKHSVFLITINSLGCVIEIVYIVIFIKYAHKDAKNLTIKLVAAMNLGSLALILLVTHFALNASLQVKVIGWICDIVSLSVFAAPLSIMAQVVRTKSVQFMPFSLSFSLTLNAIMWLAYGLFNKDNCVALPNVGGVALGLLQMVLYAIYRNCGARELATEGGMRTIVVVNPLGPAEVFPIAENDEVNDEVAEDHAQEKTVEAIDCPL

SEQ ID NO: 368 - protein, 259 aa, Phaseolus vulgaris
MVTADTIRTVVGIIGNIISGCLFLSPVPTFVEIWKKGSVEQYSAVPYMATLMNCMVWTLYGLPMVHPHSFLVVSINGGGCVIEMIYVTLFFLYSHRTRRLTLFLCLFSQLIFLTLLSILTFTSIHDVNKRSAVVGTICVIFNVAMYASPLSVMKLVMKTKSVEYMPFSLSLASFGNGVAWTTYSLIPFDPFMAIPNGIGTTFSVAQLILYATYYKSTKRQITARNAKGVGEVNLSEVVVGNNDQDPNNINKIGVVPHGL

SEQ ID NO: 369 - protein, 304 aa, Phaseolus vulgaris
MANDAPYVFAVGILGNLVSFCCFLAPVPTFYRVCKKKTTESFQSLPYVAALFTSMLWIFYAYIKTGEILLITINAFGCFIETVYLIIYITYCPKKARYFTFKMIFLFNVGVIFLVVLLTHVLAKERTARIELLGWICVVLSTSVFAAPLSIIKVVIRTKSVEFMPITLSVLLTVSAIMWMAYGILLRDIYVTLPNFVGITFGTIQIVLYFIYRKHKPVKDQKLAEHKDNVTNEENANTAVRSVNQGANAVAFVDVEFGEKKEVKKVEEAEKKQDQVGNSRDRTEHNNNSNKTREASTQLQHREG

SEQ ID NO: 370 - protein, 258 aa, Phaseolus vulgaris
MAMHRESWAFVFGLLGNIISFGVFLAPLPTFYQIYKKKSTEGFQSLPYVVALFSAMLWIYYAFVKREAALLLITINTFGIVVESIYLTIFLIYAPRKPRLTTIKLLLLLNVFGFGAMLLSTLYLTKGAKRLAIIGWICLVFNISVFAAPLFIISRVIKTRSVEYMPFTLSMFLTINAVMWFFYGLLLRDYYVALPNTLGFVFGIIQMGMYLMYRNATPVALEEPVKGQESNGHIVGAVKMGTIEPNHAGAGLGGVGKV

SEQ ID NO: 371 - protein, 189 aa, Phaseolus vulgaris
MAMHRESWAFVFGLLGNIISFGVFLAPLPTFYQIYKKKSTEGFQSLPYVVALFSAMLWIYYAFVKREAALLLITINTFGIVVESIYLTIFLIYAPRKPRLTTIKLLLLLNVFGFGAMLLSTLYLTKGAKRLAIIGWICLVFNISVFAAPLFIIVSLLRKLLLCLRNLEQKLTHEPMINSIVMTNTCRVE

SEQ ID NO: 372 - protein, 249 aa, Phaseolus vulgaris
MTAPPDIARTVVGIIGNIISGAMFLSPLPTFIEIWKKGSVEQYSPIPYLATLLNCMVWTLYGLPMVNPHSILVVTINGSGSVLELIFVTLFLIYSDGKKRLKVILWLLLELAFVAVLTFVTLTQVHTIKKRAEIVGTISILFNVMMYASPLSVMKLVIKTKSVEYMPFYFSLASFGNGVAWTTYALIRFDPFITIPNGLGTLLAVAQLVLYATYYKSTQRQIAARNANKEVNLSHVTVCNGSEQSKPNH

SEQ ID NO: 373 - protein, 273 aa, Phaseolus vulgaris
MAILNTHNHLALAFGLLGNIISFMVYLAPLPTFYRIYKKKSTEGFQSLPYLVALFSSMLWLYYAVLKPADATLLITINSVGTVIETVYIVLFTVYATTDARKLTVKLFVVMNVGSFALIFLVTFFTMHGALRIQVVGWVCVAISVGVFAAPLSIVTQVIRTKNVEFMPFNLSLFLTLSAITWFSYGFFLKDICIAIPNVLGFTLGLVQMLLYAMYRNGKSKIVTEEEAMKNVVVVSPLGTCEGYPVQIMDEEKEKGIYGREKEKGVEAKECPA

SEQ ID NO: 374 - protein, 248 aa, Ricunus communis
MDVLHFLFGVFGNATALFLFLSPTITFKRIIKSKSTEQFSGIPYVMTLLNCLLSAWYGLPFVSKNNLLVSTINGTGAVIETIYVLIFIIYAPRREKSKILGLFTLVLTIFALVAFVSLFALHGSTRKLFCGLAATIFSIIMYASPLSIIRLVIKTKSVEFMPFFLSLFVFLCGTSWFIYGLLGRDPFVAIPNGFGCGLGTLQLILYFIYRNSKASAEAKKQPTSQSMEMGPSGKPQKMVANGSQDEQV

SEQ ID NO: 375 - protein, 251 aa, Ricunus communis
MGDRLRLAVGVMGNAASLLLYAAPILTFARVIRKRSIEEFSCVPYIVTLGNCLLYTWYGLPVVSCRWENLPLVTINGLGIFFEISFILVYFRFAETRGKIKVAITIIPVILYFAATAAISSFAFHDHHHRKLFTGSVGLLASVGMYGSPLVVMKQVITTKSVEFMPFYLSFFSFLASSLWLTYGLLSHDLFIASPNFLGVPFGIIQLVLYFIYRKWGVMEEPKDRDLERDNGEKSKQLKLAVDENTNGGKC

SEQ ID NO: 376 - protein, 288 aa, Ricunus communis
MANLSFIVGILGNIISILVFASPIKTFWIVMKKKSTENYKGVPYITTLLSTSLWTFYGLLNPDGLLVVTVNGTGVVFQSVYVTLFLIYAPKDKKIKSAKLVALLNVGFVGAVIAVTLLAMHGHLRLTFVGIVCAALTIGMYAAPLSAMRMVIKTKSVEYMPFLLSFFLFLNGGIWSIYALLVKDIYIGVPNATGFVLGSVQLILYAIYKSKSPSTKPQDAIGEGSAHSVKGDIEMDAYSNDEEASAKNISLDKGISLPVPSVNRQKSLQKVLRTLSLNAKDLQYWAIE

SEQ ID NO: 377 - protein, 244 aa, Ricunus communis
MELSILFVGIIGNVISVLMFLSPVGTFWRIIKNESTEEFESLPYVCTLLNAALWTYYGIIKPGAYLVATVNGFGIVVEIVYVALFLIYAPAKMRAKTAILVALLDVGFLAAAILVTRLALKGEVRIDATGFMCAGLNIIMYGSPLAAMKTVVTTKSVEFMPFFLSFFFFLNGGIWTFYAILTRDYFLGVPNGTGFCLGITQLVLYAIYKNAKPCKTRVSDHRNGLEEGSQYENLISSSQTTPGN

SEQ ID NO: 378 - protein, 261 aa, Ricunus communis
MVSSDTARNVVGILGNIISFFLFLSPVPTFIQIWKKRAVEQYSATPYLATLVNCMVWVLYGLPMVHPNSLLVITINGTGTAIEILYLIIFIVYSDKKKRLKVVLAVLVEVIFVAVLALLVLTLAHTTKKRSMIVGFVCICFNIMMYASPLSIMKMVITTKSVEYMPFFLSLASLANGVAWSSYAFIRFDPFIFIPNGLGTLFALAQLALYAVFYKSTKRQIEARQGKAEVGLSEVVVNGNGNSKRTGPEPLNAFGSEINGA

SEQ ID NO: 379 - protein, 285 aa, Ricunus communis
MTMAEHHPLIFTFGVLGNIISILMFLSPMFTFIRVYKKKSTEGFQSIPYVVALFSCMLWIYYAMLKSGDYLLLSINSFGCLVQTIYIVLFIFYAEKKAKILTLQLLFLMNFAGFLAIVALTRFFAKGSSRLHIVGWFCVAVSAVLFAAPLSVIRLVVRTKSVEFMPFTLSLFLTLSAIMWLLYGVLLKDLYIALPNIFGLVFGAIQMVLYVIYRDGKKVIELPEKIDMDSPIKTFEVHAAVVSLPIPDDNYQVNKEDNPNEQRKPNADSTESLNQEQFTVDEVTA

SEQ ID NO: 380 - protein, 297 aa, Ricunus communis
MAIFNTHNPSVFVFGLLGNIVSFVVFLAPVPTFLRVCKKKSTEGFQSFPYVVSLFSAMLWLYYASLKSDAFLLITINSVGCLIETIYITLFITYAPKQARITTLKILLLLNFGGFCLILLLSHFLAKGSERATILGWVCVIFSVSVFAAPLSVMRIVIRTKSVEFMPFYLSFFLTLSAIMWLFYGLLLKDLYIAVPNILGLVFGVLQMILYVIYKNVKTVVEEPKLPEHNVDNVKLSAVITCEVQQEVCSQSQPNGDDGAHNKEQKMHDNPANAVTEYQRHSGMDASIADQSIACRV

SEQ ID NO: 381 - protein, 249 aa, Ricunus communis
MATLFSFSKSDIILTLGVLGNITTGLVYLAPVKTFWRIVVNKSTEEFESMPYICKLINAYCWVYYGILKPNSILVATVNGFGAVCEIIFVLLFLLFAPPRMKFITAILAGVLDVGFPAAVVIITQLFLKREAQIDVAGFFCVFFSMAAYGSPLSAMKTVITTKSVEFMPFLLSFFLFINGGVWTLYAILAKDWFIGLPNGTGFGLGTAQMILYAIYYKRPQPQKHSDSLEDGWENECLISESDRITPKD

SEQ ID NO: 382 - protein, 286 aa, Ricunus communis
MALNDPRFILAFGILGNIVSFLVYLAPLPTFWRIVKKKSTEGFQSIPYSVALFSAMLTLYYATLKENAILLITINSIGCLIEGIYLTIYMIYATQTSRVQIHFKLLILFNLGTYLLIVMLASELTHGTLRVQVVGWICAVFSVCVFAAPLSIMRLVIKTKSVEYMPFSLSFFLTLCAISWLGYGLAVNDYFIASPNILGFLFGIVQMVLYMIYKNKKNEILPTSTSQELAVSKPETSQDRENSNSSSLNQQDLEAAKDDRRENNKAVPEEASERNGYRATCFGISF

SEQ ID NO: 383 - protein, 272 aa, Ricunus communis
MAIISTHPPLAFAFGILGNIISILVYLAPVPTFYRIYRKKSTEGFQSLPYLVALFSSMLWLYYAMLKKDVFLLVTINAFGCVIETIYIIMYIIYATKKNRVSTFKVLTSMNLGLFAFIILFSHFLVKSSVRAQVLGWICVAVSVCVFAAPLSIVAQVIKTRSVEFMPFNLSFFLTLSAIMWFAYGLSTKDTCVALPNVLGFILGLLQMVLYVIYRKAKKVILEEKLPEHLKTIVVLSTLGNSEQQLVTPVGSLLIFGQFRDVATCRRFQILL

SEQ ID NO: 384 - protein, 242 aa, Ricunus communis
MVNARTIVGIVGNIISFCLFLSPLPTFYRIIKKKDVEEFQFYPYVATVLNCMLWMFYGLPIVKEDSLLVVTINSIGLVIELVYLGIYCFYDNQNKGRKKVGLCLLGEVGFMAVIIAIAMLAFHKLKYRSLFVGVFCDILNVMMYSSPLLIMKKVIMTKSVEYMPFPLSLAGFLNGACWTAFAIIKLDLFILISNGLGTLAGAFQLIIFFRYYRWCAPKQTDDDDIVKPSEIQLSGANAASRV

SEQ ID NO: 385 - protein, 279 aa, Ricunus communis
MAFHLTLAFAFGLLGNIISFLVCLAPMPTFYQICKKKTSEGFQSIPYVIALFSATLWLFYAIFANDATLLITINSFAFFMETAYIAIYLFYAVKKDRLFTTKLVLSLNIFAFGSICVIAMFLTHGQKRVQLLGWICMVFALCVFVAPLAIVRKVIKTKSVEFMPFSLSFFLTLSAVMWFFYGFLKKDLYVAVPNILGFMFGVLQMILYLIYRNPKKTGDDDQKANELPNQHSIIDVAKLNTRVSCCEPNATTVAHSRNDREEQQTMQINREDKDATNTV

SEQ ID NO: 386 - protein, 168 aa, Ricunus communis
MPIVSPEVILVATVNSIGAIFQFIYILIFILHADKARKLKMIGLLVAVSALFAVIVFVSLNFFESHARQMFVGYLSVFSLISMFASPLCVINLVFKTKSVEYMPFYLSLATFLMSLSFFAYGMLKYDPFISVPNGIGTILGITQLMLYFYYSSKYGEGSRDPLLASYA

SEQ ID NO: 387 - protein, 215 aa, Ricunus communis
MDCRPTFRKIINQKAVEEFKPDPYLATVLNCAMWSFYGLPIVEEDSILVTTINAAGLVIELTYVAIFFVFAPFHKRKKIVIVLVLELIIMAGVIIITMGIFSSIKKRATFVGILCIILNVIMYTSPLTVMRMVIRTKSVKYMPFYLSLASLCNGLIWVAYAALRFDIYLVLPNGLGALSGLVQIVLYAIYYRTTRWEDDDHETSRQPEVQVSSRV

SEQ ID NO: 388 - protein, 236 aa, Ricunus communis
MVSASAEFAHAVVGSIGNVISLILYLSPMPTFCHIYNQKDVEEFQCYPYVAAVMNCLLLIFQGLPMVAPSANSPFIFIINGLGLAVELLYLHIFRYYEKKHKGFSRVVLFLAAEVILLAIIVTAALLGFHTHSNRNLFVGIFCAVSNVVMYGSPLAIMKKVVLTRSVEYMPHDLSLASFFNGVFWTVYAVIIFDPLTLASNGLGALLSLAQLLLYAYYSNPKRTAAVMPVQLEPVI

SEQ ID NO: 389 - protein, 277 aa, Ricunus communis
MAYHLSLEFLFGVLANIISSMVCLAPLPTFYQICKKKTSEGFQSVPYVIALFSAMLWLFYATFDDNATLLITINSFTFFMEVGYLSVYLFYGTRKDRMLTTKLVLFFNVFGFGMIAILTLFLTHGRKRVDVLGWICMIFALCVFVAPLGIMRKVIKTKSVEFMPFSLSFFLTLSAVMWFFYGFLKKDIYVYIPNVLGFFFGIVQMILYLIYRNSKKPVEEPKSQEFSEHIVDVAKLSAVICSELKTMVVAKLNDNGNEVVKEETKNTKQEMEASNKV

SEQ ID NO: 390 - protein, 194 aa, Ricunus communis
MNCMLWNFYGLPMVHPGSTLLVTINSVGLALELIYITIFFIYAQRNGRLKVTGFLFMEFVVMTALVSFTLKFYDNHGQRSTLVGIFCVVINILMYASPLTIMKKVIITKSVKYMPFCLSLATFLNGAIWVLYATVDIFDLFVLIASSVGVLSGVLQLILYACYYKAVPTLQVDDHHEKPADLQISVAVVDEEKA

SEQ ID NO: 391 - protein, 233 aa, Ricunus communis
MVIAKYSSNFVGIIGNTTSIGIFLLPAPTFYSMWKKQDIDQEFQFHPHLLKVQVCLLWIFYGLPVVKPDRLLIATCNGLGLVVELVYLATFCFCDRENKGRTLVALGLAGEVIFTAVIVVVTLLDFHTQDNRALLVGMFCVAFSVVMSSCGLGTMKKVIDTQDVESMPFNVSLANLANDCFWAAYALITTDHFVFFSYGIGALCSLAQLIVYACYYKPENDVLKLSKIHPSSG

SEQ ID NO: 392 - protein, 222 aa, Prunus persica
MDTDMIRTIVGIIGNVISFGLFVSPIPTFVKIIKQKSVAEFRPDPYIVTLLNCALWSFYGLPIVHPDNLLVVTINGTGLVIEFIYIAIFFVFSPGKKRRNIIIALLVEVVFFAVVVFITLHFFHDTKGRSMIIGILSIVFNIIMYNSPLTVMKMVIKTKSVKYMPFYLSLANLCNGIVWTIYALLKFDPYLLLPNGLGAVSGAVQIILYATYYKTTNWDEDG

SEQ ID NO: 393 - protein, 251 aa, Prunus persica
MEGLIIFIGVIGNIISVLMFLAPVGTFWRIVKHRSTEDFESLPYVCTFLNSFLWTYYGIIRPAGGLLVATVNGFGVVVEIIYLILFLVYAPAKMRAKTAILIGTLDVGFLVAAILATWLALQGETRIDALGFICAGLNIIMYGSPLVAMKTVITTKSVEYMPFFLSFFFFLNGGVWTLYAWLIRDVFLGVPNGIGFLLGTTQLVLYAIYRNAKPADNISSGLLEEGRQHEPLISPSSATPSQKNGEILETT

SEQ ID NO: 394 - protein, 260 aa, Prunus persica
MHILKVFFGVVGNATALFLFLAPIITFKRIIQKRSTEQFSGIPYVMTMLNCLLSAWYGLPFVSPNNILVSTINGTGAAIEAIYVLIFIIFAPKREKFKILGLFTIVLAIFSTVALVSVFALHSKARKLFCGLAATVFSIIMYGSPLAIMSTVIRTKSVEFMPFFLSLFSFLCGTSWFIFGLLGHDPFVAVPNGFGSGLGALQLVLYFIYRDSSKGSTGSIKKASSSSTAATADESMEMGVAKPHQSKQSMAISGAQDGQP

SEQ ID NO: 395 - protein, 147 aa, Prunus persica
MFGVKDFMNIFKFLFRAVFGGVFRNAIAFFLFLVPMYALRFWFNTNRTTLKRIMKKNKFTEQYLSGIPYLMTLLLSAAWYGLPLVSPKNILMLTINTIGAAIEAIYLLIVFLLAPKMEKEKILELLTSALSFKQRQNPKKIKETLST

SEQ ID NO: 396 - protein, 216 aa, Prunus persica
MVTADAARNVVGIIGNVISFGLFLSPVPTFYRIIKKKTVEEFKPDPYIATVLNCLFWCLYGMPFVHPDSLLVVTINGVGLVLELAYLAVFFIYAQSKGRKKVAFGLGFDVVLFVAIAAISLTALHGTKKRSLMVGIVCDIFNIIMYGSPLTIMAKVIKTKSVKYMPFYLSLTNFLNGCCWTAYALIKFDIYMLVSNGLGAVSGAIQLILYAAYCNV

SEQ ID NO: 397 - protein, 277 aa, Prunus persica
MGALADSHHPWAFTFGILGNVISFLVYLAPVPTFYGIYKKKSTQGFQSVPYLVALFSGMLWFYYALLKKNAMLLITINSFGTVIETIYIVMFIFYAPKDARKFTLKLFGFMNVGLFCSILVLSHFAVRSEYRVPVLGWINVAISVIVFAAPLSIVAQVIRTRSVEFMPFSLSFFLTLSAVMWFSYGLFLKDICIAIPNVLGFILGLLQMLLYAIYRNRKPIEDDEKKIPAADQHVKNVVGLTTLATSEVHPVDPPPRDHDKSVEVDAGSHTAAASCA

SEQ ID NO: 398 - protein, 241 aa, Prunus persica
LELKALMVFSASHSVFIICRDAAGIAGNIFAFGLFLSPIHTYRRIIRNRSTEEFSGLPYIYALLNCLICTWYGSPLVSSDNLLIMTVNSAGAVFQLVYIALFIIYAEKSKKVRMLGFLLADFGLFAIIVFGSLQMTDLVMRRLIVGLLSCVSLISMFASPMFIINLVIRTKSVEFMPFYLSLSTFLMSTSFFLYGIFNYDLFIYVPNGIGTILGIIQLALYFYYKDSSKEDSREPLIVPYP

SEQ ID NO: 399 - protein, 193 aa, Prunus persica
MLFIAGNAAALLLFSAPILTIASVIRKKSTEEFSCVTALLNCLLYTCYALPVVSYRWENFLLVTINGFRGLLEFSFIFIYFWFSTSKGKASLAFLESYLLFYRKMKVAVIMIPVIIVFCITAIIPAFVFHDHHHRTVFVGSVALVPSVAMYAAPLVVVDCASDTNKECRIHAILLTPNLVGCPLGILQLVLYC

SEQ ID NO: 400 - protein, 166 aa, Prunus persica
MIWIYYAFLKSDEFLLITINAFGCIIETIYISMYITYAPKQARVILGWVCVAFSVSVFAAPLSIMRVVIRTKSVEFMPFSLSFFLTLSAVMWLFYGLLLKDLYVACPNILGFTFGVAQMILYAIYRNKKTVLVEDQKLPEHKGDVVKQIQILSTTPEVEIQVQAVA

SEQ ID NO: 401 - protein, 244 aa, Prunus persica
MKFLSNEQLAFVFGLLGNIVSFMVFLAPIPTFYTIYKKKSSKGFQSIPYVVALLSAMLLLYYGVLKTNAFLIISINGIGCVIEIIYLIFYIVHASKKDKITTMSLILLVNVAAFGLVMAVTLFLLGEAKRVSAVGWMCAVFNIAVFAAPLSIVRQVIRTKSVEYMPFSLSFFLTLCATMWFFYGLFTKDYYIALPNVLGFLLGVAQMILYLKYKNSGKNDAENKGSQEMKKFHEPQPPEADAQC

SEQ ID NO: 402 - protein, 184 aa, Prunus persica
MARIIRKKSTEEFSCVPYITALLNCLLYTCYALPVVSYSWENFPLVTINGLGMNVAVIMIPVIIVFCITAIISAFVFHNHHHRTVFVGSVALVASVAMYAAPLVVVKQVILTKSVEFMPFYLSFFSFLSSSLWMAYGLLSRDIFVTVLYRKRGTQELPNKWDFEEVNDKNPKQVVICQSANTES

SEQ ID NO: 403 - protein, 226 aa, Prunus persica
MVDTGTIRMVVGIIGHPTFCRIIKLKTVADFKPDPYVATLLNCAMWVFYGMPFVHPDSILVITINGAGFFIELIYITIFIIYSPGSKRKKIFIALVTEVIFFVIVVFVVMYCFHTTKRRSLIVGIICIVFNILMYASPLTIMKIVIKTKSVKYMPFYLSLASLLNGVVWVVYALLKFDINILIPNGLGAISGVVQLILYATFYRTTRWDDDDDEMNSRSKVQMSNV

SEQ ID NO: 404 - protein, 284 aa, Prunus persica
MAAPDAFLLASVFGILGNIVAFMVYLAPLPTFYRIFKKKSTEGFQSIPYSVALFSAMLMLYYAFLKTNAFMLITINSVGCIIETSYLVMYMIYAPAKTRIYTAKLLVLFNVGVYGVIVLSTYLIPNHFLRIKVVGWISVVFSVCVFAAPLSIMRLVIRTRSVEFMSFPLSFCLTLCAVMWFFYGLLVRDLFIAAPNILGFAFGLAQMIMYLMFKNSKKSMLPEFSLNQIPNVVAVNDIVASDSQLKTEDTKKSSEAEENQSTESMTNDRRAGDAAAAEPNESIV

SEQ ID NO: 405 - protein, 259 aa, Prunus persica
MVSADVVRTVIGVIGNVISLILFLSPVPTFVRIWKKGSVEQYSPAPYLATLANCMVWALYGLPMVHPHSILVVTINGSAIFIELSYIILFLIYASDKKQRLKVLLILLVELVLMALLVLTVLILAHTYERRSLIVGIVCILCNIMMYASPLAVMKLVITTKSVEFMPFCLSLFSFANGLAWFSFALIRFDIFLTIPNGLGLLFGSGQLILYATYYKNTKRLLAERKARQVSLTEVVSDGDEPKKIGSTTQNGSAPHHGT

SEQ ID NO: 406 - protein, 293 aa, Prunus persica
MAIQHPLTLSFGLLGNIISFLVFLAPVPTFYTIYKRKTAEGFQALPYVIALLSSMLYIYYALLKEEFKEDATFLITINSFGCVVETLYISLFLFYAPKKARISTLTLVFLLNLFGFGLMMLLTHFLATGEMRLKIVGWICLVFSLSVFVAPLGVLRRVIRTKSVEFMPFPLSFFLTLGAVTWFFYGLLIKDYNIAFPNILGFLFGIAQMVLYIVYKNTKKVLEEQPKVQELSEHIIDVVKISSLVCPELNPVVLQPTLDITNDMIEAVQNIIVMAEKTEEAKEAMDIDASTKV

SEQ ID NO: 407 - protein, 235 aa, Prunus persica
MLSTGLSSVYLGFSTAAGIAGNIFAFVLFVSPLPTFKRIIRNKSTEQFSGLPYIYAFLNCLICLWYGMPVVKTGIILVATVNSFGAVFQLVYLSIFITYAERATKLRMLGLLGAVAVVFAFVVFVSLGVLEYDDRQTFVGYLSVASLISMFASPLFIIKLVIKTRSVEFMPFNLSFATFLMSLSFSAYGIFKEDPFLYIPNGIGTILGLVQLALYSYYSKISGEDSREPLIVSYV

SEQ ID NO: 408 - protein, 218 aa, Prunus persica
NVFVRILRRRSTEEFESVPYVSKLLNAYFWVYYGLIKPNSVLVATVNIFGAVVEIVFLTIFLLFAPPRMKARTAMLVVALNVAFPAAAILLTQFLLHGDQRIDAAGLLCSVFSMIAYASPLSAMKTVVALKSVEYMPFLLSFILFLNGGIWTLYAILAKDLFVGIPNGTGFLFGTAQLILYAIYWKPSKPPKQVSDDLEDQQHIREALIPASKPIIAE

SEQ ID NO: 409 - protein, 234 aa, Prunus persica
MVNLEAIRIIVGIIGNVISFFLFTSPFTTFLKIIKQKSVGEFKADPYVATLLNCAMWSFYGMPFVHPDSVLVVTINGCGFVIELIYIAIFLTYSSNAKRRILIALLVEVIFFAVVVFVTLHFLHTTKGRSMIIGILCIVFNIIMYASPLTIMKMVIKTKSVKYMPFTLSLANFCNGIVWLIYALIKFDPYILVPNGLGSISGLVQLILYATYYKTTNWDEEDEKPKSEVQLSDV

SEQ ID NO: 410 - protein, 136 aa, Prunus persica
MLLLFYGVLKTNAALIISINVIGCVIEITYLIFYFVYASKKDKVTAFKMTDFPFSAFGSVVAVTFLLVGEDKRVSTVGWICAVFGIAVFAAPLLIMRIVIRTKSVEYMPFYLSFSLTICATLWFLYGLFVKDYYIA

SEQ ID NO: 411 - protein, 15 aa, Nicotiana attenuata
QPSLKRMKIQPSSQP

1. A method of increasing the levels of at least one sugar in developing seeds in a plant, the method comprising
a) inserting an exogenous nucleic acid in a plant cell, wherein the exogenous nucleic acid comprises a polynucleotide sequence that codes for at least one sugar transporter protein (SWEET protein), to generate a transgenic plant cell, and
b) subjecting the transgenic plant cell to conditions that promote expression of the at least one SWEET protein during seed development,
wherein the levels of at least one sugar are increased in developing seeds in the transgenic plant as compared to seeds in non-transgenic plants of the same species grown under the same conditions as the transgenic plants.

2. The method of claim 1, wherein the exogenous nucleic acid comprises at least one promoter selected from the group consisting of, a constitutive promoter operably linked to the at least one SWEET protein, a tissue-specific promoter operably linked to the at least one SWEET protein, an inducible promoter operably linked to the at least one SWEET protein.

3. The method of claim 1, wherein the at least one SWEET protein is selected from the group consisting of SWEET 1, SWEET 2, SWEET 4, SWEET 5, SWEET 7, SWEET 8, SWEET 9, SWEET 10, SWEET 11, SWEET 12, SWEET 15.

4. The method of claim 1, wherein the at least one SWEET protein is selected from the group consisting of SWEET 2, SWEET 4a, SWEET 4b, SWEET 4d, SWEET 13b, SWEET 13c, SWEET 14a, SWEET 14b, SWEET 15a, SWEET 15b.

5. The method of claim 3, wherein the SWEET protein is from the same genus or the same species of plant as the transgenic plant.

6. The method of claim 1, wherein the sugar transporter is a sucrose uniporter and the at least one sugar is sucrose, wherein the sugar transporter is a glucose uniporter and the at least one sugar is glucose, or wherein the sugar transporter is a fructose uniporter and the at least one sugar is fructose.

7. The method of claim 1, wherein the plant cell is comprised within a mature plant.

8. The method of claim 1, wherein subjecting the transgenic plant cell to conditions that promote expression of the at least one SWEET protein during seed development occurs during or after the plant cell develops into a mature plant.

9. A transgenic plant seed with increased levels of at least one sugar as compared to non-transgenic plant seeds of the same species, produced by the method of claim 1.

10. A method of making a transgenic plant that produces seeds that have increased levels of at least one sugar contained therein as compared to non-transgenic plants of the same species grown under the same conditions, the method comprising
a) inserting an exogenous nucleic acid into a plant cell, wherein the exogenous nucleic acid comprises a polynucleotide sequence that codes for at least one sugar transporter protein (SWEET protein), to generate a transgenic plant cell, and
b) growing the transgenic plant cell into a mature transgenic plant under conditions that promote expression of the at least one SWEET protein during seed development, wherein the levels of the at least one sugar are increased in developing seeds in the transgenic plant as compared to seeds from non-transgenic plants of the same species grown under the same conditions as the transgenic plants.

11. The method of claim 10, wherein the exogenous nucleic acid comprises at least one promoter selected from the group consisting of, a constitutive promoter operably linked to the at least one SWEET protein, a tissue-specific promoter operably linked to the at least one SWEET protein, an inducible promoter operably linked to the at least one SWEET protein.

12. The method of claim 10, wherein the at least one SWEET protein is selected from the group consisting of SWEET 1, SWEET 2, SWEET 4, SWEET 5, SWEET 7, SWEET 8, SWEET 9, SWEET 10, SWEET 11, SWEET 12, SWEET 15.

13. The method of claim 10, wherein the at least one SWEET protein is selected from the group consisting of SWEET 2, SWEET 4a, SWEET 4b, SWEET 4d, SWEET 11, SWEET 13b, SWEET 13c, SWEET 14a, SWEET 14b, SWEET 15a, SWEET 15b.

14. The method of claim 10, wherein the SWEET protein is from the same genus or the same species of plant as the transgenic plant.

15. The method of claim 10, wherein the sugar transporter is a sucrose uniporter and the at least one sugar is sucrose, wherein the sugar transporter is a glucose uniporter and the at least one sugar is glucose, or wherein the sugar transporter is a fructose uniporter and the at least one sugar is fructose.

16. Transgenic plant seed produced by harvesting the seeds produced in the transgenic plant that is produced by the method of claim 10.
